United States Patent Application Publication US 2022/0073565 A1 - sequence listing, part 2

SEQ ID NO: 11492 - protein, 186 aa, Artificial Sequence
  Synthetic
SEIEDLIRRIRETLKRVEEDSRRSKEEAKRKLDKVKEDSERLVEKMRRDLEKVKRETDKGDRPDEDLRRKLERIKKELERELKEHHDRIERVKRDLRRLNREHHEKIRKIKEDLKRILDDAARKGADEELLKRLKEVVEDVIRKLDRLDKEHTEIVEEVERRLDKLDKDVERIVEEVKKALDETEK

SEQ ID NO: 11493 - protein, 186 aa, Artificial Sequence; identical to SEQ ID NO: 11492
  Synthetic

SEQ ID NO: 11494 - protein, 186 aa, Artificial Sequence
  Synthetic
SEIEKLIEDIRRRLKKLEDESRKSVKDARDMLRRVEERSRDSVRKMREELERVEDESRRGDRPKEALEEIIRRIKKKLDENHKRHHDEIEKIKEELERLNREHHDRVRRAKEDLDRILEKAAREGLDDELLKRLEDVVRDVKRKLDELDERHTRIVEDVKRRLDDLDREHRKIVEEVKKELDKLLK

SEQ ID NO: 11495 - protein, 186 aa, Artificial Sequence; identical to SEQ ID NO: 11494
  Synthetic

SEQ ID NO: 11496 - protein, 186 aa, Artificial Sequence
  Synthetic
SEIEKLIEELRRELEKVKDELERSIEEMDRELDDVRRDSKRLVDEIKRELREVTERTKRGDRPEEVLRKELEDIKRKLRRILEEHHEKIRRIKEKLRRENKRVRDELKRIKDEIDEKVKDVRRKGADEELLKRLEEVAEDVKRALEELLKKHTRVVERVEKALDELDKELERIVREAEKELDRREK

SEQ ID NO: 11497 - protein, 186 aa, Artificial Sequence; identical to SEQ ID NO: 11496
  Synthetic

SEQ ID NO: 11498 - protein, 186 aa, Artificial Sequence
  Synthetic
SEVEEEEKTAEKILEEVAEEIKESIKRIREEVKKNEDDSERSVREMERRLREVEERIRRGDKPKEAVEKEVREIKDELRRNHEEHHRHLRRNERRLDRENEELRRRLEKIKKELEDRLRRLAEEGQDEELLRRLKRVVERVKERLDRLLEEHTRVVEEAKERHRELDERHEKIVRDVVRELDRRVK

SEQ ID NO: 11499 - protein, 186 aa, Artificial Sequence; identical to SEQ ID NO: 11498
  Synthetic

SEQ ID NO: 11500 - protein, 186 aa, Artificial Sequence
  Synthetic
SEVEKVVKELEDELRRVAEDSERSIREMEKRLDDFRKRVRETAEKMKEDLRRVEERARRGDQPEEALTRELERIKRELEKKLREAREDVKRIKDELEKLNREHHKKIKEIKDELRRTLDKLRKDGLEERILKRVEDIVRRVEEELDKLDEKHTRVVKKVSDALDRIVEELEKIVREVAKRLEDLRK

SEQ ID NO: 11501 - protein, 186 aa, Artificial Sequence; identical to SEQ ID NO: 11500
  Synthetic

SEQ ID NO: 11502 - protein, 186 aa, Artificial Sequence
  Synthetic
SEVEKKIEEMRRTLDEARRRSEESKREIKKELDEARKRVEESLKRLRETLKKVEDERRRGDTDKEELKRRIERIKRELDENHKRLKKELEEIKERLRRKNEEHHKEIERIKRELEKKLKDLERKGLEERLLRRVAKVVEDVKRELDRLDEDHTRAVEEVERALDDLLKKHEDVVREVKTELEKLLK

SEQ ID NO: 11503 - protein, 186 aa, Artificial Sequence; identical to SEQ ID NO: 11502
  Synthetic

SEQ ID NO: 11504 - protein, 176 aa, Artificial Sequence
  Synthetic
SELEELIRDIERKLEKVKRDSERSMREIEEDLKRVRKKTEESERRIRDLLDKVRKRKVDKDKLKRIKEELRKLNKDHRDDIERIKRRLDKLNKEHREEIERIKKELRELVKRVEDAGLDRTEDLRRVAKRVEEELDRSNEEHSKIVDKAKRDLDKSNKEHSKVVEDAERTLDRVED

SEQ ID NO: 11505 - protein, 176 aa, Artificial Sequence; identical to SEQ ID NO: 11504
  Synthetic

SEQ ID NO: 11506 - protein, 176 aa, Artificial Sequence
  Synthetic
SELEELEERIERLLEKVRRESEKLLRELEKKLKDVERKIEDSIRKIRDDLRKVRERKVDREKLEEIKRKLEKLNDEVRDDLRRIKREIAELVKTHEKRIREIKEELDRTLERVERTGLDRTEDLRRVLDRVKKDLDRSNEEVRREADRIMKELDKLLKKHSDVVKEVLEALDDTDR

SEQ ID NO: 11507 - protein, 176 aa, Artificial Sequence; identical to SEQ ID NO: 11506
  Synthetic

SEQ ID NO: 11508 - protein, 182 aa, Artificial Sequence
  Synthetic
SEIEEIKRRLEETNKRVREKNKRSVDRIKEHLERSRRRVEEIIRRIEKLLEELEEKARRTDISDDVIRELKKRLEDILKELEEHHKRNKEDSDRNRKELEETLRRLKKKHEDIKRELEKMDVDEKLLRDLEKALRDSIRTLKRSVEENDRINKEANEDSERLLRELKKVLEKAKKDVDELRR

SEQ ID NO: 11509 - protein, 182 aa, Artificial Sequence; identical to SEQ ID NO: 11508
  Synthetic

SEQ ID NO: 11510 - protein, 184 aa, Artificial Sequence
  Synthetic
SLEEELRELARRLKEEVRKLEETLEKVLEDSARNIKRLIDDLKRVNDELRKRVDDLIREVGDKETVDRMKKEIDDSSKEVEKLVRELEKEVDDLRKEHEKLVRDIRRKIKELEDEIRDLERKRIEKEALDRVRKKLEDALKKLRDEVREMKKKNDKTNKEVKDKADELRKKHEDTLEELKKRVK

SEQ ID NO: 11511 - protein, 184 aa, Artificial Sequence; identical to SEQ ID NO: 11510
  Synthetic

SEQ ID NO: 11512 - protein, 178 aa, Artificial Sequence
  Synthetic
SEVDEIIKRIEDLLKEVRDESKRNEDRIREKLKRLKKKSEDNAEKIKDELKKIRDRKVDDEEIKKIKEELRENLKRVEEDVRRIKEDLDRNLDEVRRRLEDIKRKLEEMLKDAERRGEPKEVLDTLRDAIRRVKEELDRNLEKNTELIKRVKETLDDLLRRNKELIRKAEETLDEERR

SEQ ID NO: 11513 - protein, 178 aa, Artificial Sequence; identical to SEQ ID NO: 11512
  Synthetic

SEQ ID NO: 11514 - protein, 182 aa, Artificial Sequence
  Synthetic
DELEKIRKELEDLSRENKEKLERIARELKRLSEENTETLEKLKEEIRRLLEKLKRIVEKDGTRDELIKEIEDELRRLLDEVRKNVEDNKRKLDEIRKEAEKDLRDNERKLEEIERRARKRGLPKEMLDRIKELLDTHRRILEDIKREIDKLLEDHRRRLEELLRDLKRALDRVREEVDRLRR

SEQ ID NO: 11515 - protein, 182 aa, Artificial Sequence; identical to SEQ ID NO: 11514
  Synthetic

SEQ ID NO: 11516 - protein, 176 aa, Artificial Sequence
  Synthetic
DDVRRIEEEIRRTLRELRETLKRVERRNREENEDLKDKMRRMKKENEDTNERVKKEGGGGEELKRRVEELARRHEKLVREIRKRLRDLAEEHKKLVEEIKRKLDEIRRRIEEAKRRGTEDKERLDKLLEDLAKEARKVIEDLKEILRRTKESIDEVEKTLREILKKSKETADRVET

SEQ ID NO: 11517 - protein, 176 aa, Artificial Sequence; identical to SEQ ID NO: 11516
  Synthetic

SEQ ID NO: 11518 - protein, 176 aa, Artificial Sequence
  Synthetic
SDLERLKKRNDDANRKLKETLDRVEKENRDVNRKLEKELKEVEEKNRRENKKVRDRGGGGKELEDRVRELKEEHERLVEEIKKELEELEKRHRKLVRDIEEIVRTLAKEHEDMKRKGTDDKEELDKILTRSEEVARRIIEELKKILEETRKSAERVIRRLEEILKESEREVREVET

SEQ ID NO: 11519 - protein, 176 aa, Artificial Sequence; identical to SEQ ID NO: 11518
  Synthetic

SEQ ID NO: 11520 - protein, 178 aa, Artificial Sequence
  Synthetic
SEVEETIKRVRDTLKKHNEESEKAIRELEEELKRLDDKNREAVEDVKRTLDELRRTKSSEDTLRKVLDKLRRDVERLVREHEAVLKKLEDRIRELKEKTKKVLEEVARIVTEVERKVKDKDLRKRLEELLREVEEDLKRNIEKLDKALKEAKEVIERSIEHLRRVLEEVERVLRELAR

SEQ ID NO: 11521 - protein, 178 aa, Artificial Sequence; identical to SEQ ID NO: 11520
  Synthetic

SEQ ID NO: 11522 - protein, 182 aa, Artificial Sequence
  Synthetic
RKEDEMRKLLDEIEKDLKRNDERVRRVLKRSKENLRRLEERAEKLLETVEREIKRLEEEGKIREDEARELRKRLEDRRREVKRELEEWERKLKEILDEVRESLKRVRERLEEIRERMEKEDRDEREVKRTIDELKDELRKHNDKTEKLIRRARETDKELNDRVAKREEEARRELEEVDRRVR

SEQ ID NO: 11523 - protein, 182 aa, Artificial Sequence; identical to SEQ ID NO: 11522
  Synthetic

SEQ ID NO: 11524 - protein, 182 aa, Artificial Sequence
  Synthetic
SLEEAVEKLLRDSEENLKKNEEDVRRLLKKSKENADRLRDEVRKLLETAEREIKRLEDEGKISEEEAKKLREELKRILDDVDKKLREWERALEEIERKVKRSLEEWRRELREIKDRVKKEDLDERLIRETEKDVKRRDEEHNTRTEREIREAKKEDEKLNKEVRDTEKRLRDELRRVEERVR

SEQ ID NO: 11525 - protein, 182 aa, Artificial Sequence; identical to SEQ ID NO: 11524
  Synthetic

SEQ ID NO: 11526 - protein, 182 aa, Artificial Sequence
  Synthetic
SKEDKVRELLRRSKENLDRVREEVRKLLKKSRDTLEELRERAKRLLEEVEEVIKRLEEEGVISEDTARRLRKALEDIKRDVERSLKEWEDRLREILEDVRKELEDWARALDEIRKRVEEEDRDEKEIEETIRRVEDMDRRLNERLRKKIEDAERMDEALRERVERLIRRVRKELEDVERRVR

SEQ ID NO: 11527 - protein, 182 aa, Artificial Sequence; identical to SEQ ID NO: 11526
  Synthetic

SEQ ID NO: 11528 - protein, 174 aa, Artificial Sequence
  Synthetic
SELEEVARRIEKMIRDLEKDLRELERKVRESDERLKRDLERNEKEHRDTIEAMRRREPDSRVDEEVKRLEDKNRKKNKEVKDESRDLKRELETTLRRIEKEIKKIEDDVRRREGDKDVRDALKKLLDELKKAVEDVRREIERLIREHKRVTEEVERADKELNDRTRKAADELRR

SEQ ID NO: 11529 - protein, 174 aa, Artificial Sequence; identical to SEQ ID NO: 11528
  Synthetic

SEQ ID NO: 11530 - protein, 175 aa, Artificial Sequence
  Synthetic
EEVERLEEEVRRRKKEWEDRLEEVKRRNEKAKRESERENEKIAREVREVVKELRERGGGGEELRKRLEDLARKLEKYKEELRRRSRKMAEEVERVKKELRERNEELARRVEELERAGADKRRLEELLRDHSRMIRRVEAELDKSLEDHKRALDENEKRIDEWLERLRKIVEEVEK

SEQ ID NO: 11531 - protein, 175 aa, Artificial Sequence; identical to SEQ ID NO: 11530
  Synthetic

SEQ ID NO: 11532 - protein, 175 aa, Artificial Sequence
  Synthetic
SKIEEIERRVRELEETWRRKLEEVEKDSRRSVKKMEEDLERAARETEEIKRRLREEDIREEELKETVDRHHKKIEEIKRELEKENKDHHKKIRDVERELDKANKELADDMERVKKDNGDERKLEELLRKHNEVIKRVKEELKRLDKEHTDIVEEVKKELDKLDEDLKRVADEKRK

SEQ ID NO: 11533 - protein, 175 aa, Artificial Sequence; identical to SEQ ID NO: 11532
  Synthetic

SEQ ID NO: 11534 - protein, 175 aa, Artificial Sequence
  Synthetic
DEDEDLERLLRKLKRVLDEIRKRIRENIEENREVVERAAREVKKSIDENRKVVDDVQLPDEELRKLREDSERKVREIERRIEEIKKDSDRLARELEKTLEDLARKVEKTERELRREGGKGEEVRKKIEDLERELRRTLEEIHKENEKSKRKIEKALRDIREENKKHIREIEETKR

SEQ ID NO: 11535 - protein, 175 aa, Artificial Sequence; identical to SEQ ID NO: 11534
  Synthetic

SEQ ID NO: 11536 - protein, 182 aa, Artificial Sequence
  Synthetic
SDIETLTRDVERSIKELEDHLKKHHEEVKERIRRLEEHADELRRRAEKLKEELKRMKDRGDSDEEVLKDILRRVKEEVDRVKKTNEDLEREVRDSEEKVKEKNRRHKEEIKKRVKEMKDRDTKTKVEEDVKRLVKKLDEVNERHRREIERNRKELEDVSRRHKEKVDRILEDIKEALDRVRK

SEQ ID NO: 11537 - protein, 182 aa, Artificial Sequence; identical to SEQ ID NO: 11536
  Synthetic

SEQ ID NO: 11538 - protein, 178 aa, Artificial Sequence
  Synthetic
SESETVKKENEDHIRKLEDDLRKLEEDNKRHVDDIERRLRDLKRENERFAEEVKKRGGGGEELKERLKELERRHEEELKDLRRSHEEYAKRVEEVLRRARRSSEEVERKLDRIRKEIDDEEVKKTLETLVRTNRRAIREVERRLKESLDHNREVLKRAEEDLRRSIRHLREVVREADR

SEQ ID NO: 11539 - protein, 178 aa, Artificial Sequence; identical to SEQ ID NO: 11538
  Synthetic

SEQ ID NO: 11540 - protein, 185 aa, Artificial Sequence
  Synthetic
SIEDELRELKERLERVVEELRRLHEKTIEDLKRVVEKSEKTLRDIRRELERVVEEVRRRRKDLEELLRRLDKKLTELEKELKKLLEDHRRVLRRLTEENRKALEKWEELLRRLTKELKEVKDRRVDKEVLDRLRKKVEDTIRKMKDEAKKLDDEHKKAVRRLEERNEETARRVRKAVEDIERETK

SEQ ID NO: 11541 - protein, 185 aa, Artificial Sequence; identical to SEQ ID NO: 11540
  Synthetic

SEQ ID NO: 11542 - protein, 185 aa, Artificial Sequence
  Synthetic
SIEDILRKLTKDLEDVIRRSRKTSEDLKEELKRVLDKHKEKLDRILEDVERVVREVEERRKDLEELKKRIRDELRKIKKRLEESLKRTEETLRELERRNRELNERHERTAREVRKRLEEVREKRVDKEILDRLEEEVRRLIEELDKENDEARKEHREVAKRNEEEIKKLEEEAKDSIRRLREESR

SEQ ID NO: 11543 - protein, 185 aa, Artificial Sequence; identical to SEQ ID NO: 11542
  Synthetic

SEQ ID NO: 11544 - protein, 178 aa, Artificial Sequence
  Synthetic
RESEELDKRLKEIAKDIRDKLDEIRRENEKTAKEIEDTIREIERDNERIDREMERRGGGGEEVERRMREAKRRHDKILKDIEDRIRTLERKHDEILKEIRREIKRVEEELREREKERDDKRFKDVIRRLEEELKKLLKRAEEEIRDSKRHLRELLKKVEKVIRESKANLDRTLKKLRD

SEQ ID NO: 11545 - protein, 178 aa, Artificial Sequence; identical to SEQ ID NO: 11544
  Synthetic

SEQ ID NO: 11546 - protein, 185 aa, Artificial Sequence
  Synthetic
SEEEDLRRKVEELEERVERYKEELKKEIERIETENKRHVEELERRLRKIAREVDDAKRRQLSREEVEEMLRRLEDALRRIEKNVRDVNRRSKKELEELERTSKEVLDRIEESLRRLAEEVKRSPRTEDLDRLLDEMRREAERLLDELRKVTERIAREVKRSNEENKKVLDEIRKAIKDLLDKLRK

SEQ ID NO: 11547 - protein, 185 aa, Artificial Sequence; identical to SEQ ID NO: 11546
  Synthetic

SEQ ID NO: 11548 - protein, 179 aa, Artificial Sequence
  Synthetic
STEEKVEEDLRRLEEKNRRHVREIEERLERMKEENRDHVRKLEEKLRRLDEEVRKVKEGGETKDEELRRLEEELRRTLEELRRSVDKSRKDHRREEETITRSHEKLEEEHRRVLDDLRKKIRNRETLKRAERKLRESLRHNREVLERARRELKKSLDHNDKALEDAERRIREIREELEK

SEQ ID NO: 11549 - protein, 179 aa, Artificial Sequence; identical to SEQ ID NO: 11548
  Synthetic

SEQ ID NO: 11550 - protein, 180 aa, Artificial Sequence
  Synthetic
DLKEVLDKLRELVREVTERIKRTIEEIERLLRKVEREMRETIRTDEELLKTVVDELRRKNADERLLRTVTEASKTSIKLNEDLMREVERAVREVIRINEELLRRVREVAKRVLEIIKNSTDRRKIKKVLDDLRKIIEDIERESRESLERLREIIERLKRRSDKTLKDSKKVIDDIRRRTK

SEQ ID NO: 11551 - protein, 180 aa, Artificial Sequence; identical to SEQ ID NO: 11550
  Synthetic

SEQ ID NO: 11552 - protein, 180 aa, Artificial Sequence
  Synthetic
DLEEVLEDLRRLMEEVKRRIERTIEEDKRLLDEVERRIRETIRRDRELLKEAERDLREKRVDERLMDTVRRVSEESVRRNEKLLREVKRVSEESIKINEDLLKEVTRVAKEVLKIIRRSDKRDKIRKVRKELREIIDRIRRESERSLEESRRVIEKIDEKSKRTLEESRRVIEEIKEKAR

SEQ ID NO: 11553 - protein, 180 aa, Artificial Sequence; identical to SEQ ID NO: 11552
  Synthetic

SEQ ID NO: 11554 - protein, 169 aa, Artificial Sequence
  Synthetic
SSEEMLRTVEELIKEARKRLDESLEEVRKRIEDAKRRHEESNDENRRLVEDAKRRVNTEEAKKRIDEVLKKSEEVNRKAKKDLDEVLKEHERVIRRIKKELDEVLEKVRRLGEDKDVLEELREIIDRLRRESEDSLRRLEKIIKDSEDRSRESSEELKEIIKRLLEEDK

SEQ ID NO: 11555 - protein, 169 aa, Artificial Sequence; identical to SEQ ID NO: 11554
  Synthetic

SEQ ID NO: 11556 - protein, 169 aa, Artificial Sequence
  Synthetic
SKDEVLEEVERRIRTAERDLERMVRRNEELIRDAKREHERSNRENERLVTEAKREIDIEEVKRELDEVLKKSKRVNDKAKEELDRVLEKSKRVADEIRRLLREVLDKVRKLGNDKDVLDELRDIIRRLREELKKSSDDLERIIRRSVKESRDSSEELRKIIEDLKREAT

SEQ ID NO: 11557 - protein, 169 aa, Artificial Sequence; identical to SEQ ID NO: 11556
  Synthetic

SEQ ID NO: 11558 - protein, 169 aa, Artificial Sequence
  Synthetic
SEKEVLDEVKELIERAKERLRRMLERNERLVRDAERKLKRLLDEDRESIERVKKRLDIEEVKRLLDKVHEKSKRVAERLLDELRKVLKKSEKVIRDITRTLDEVLKKVEELGRDERVLEELKKEIRRLEEEVKKSSEELERIIEKLLEELKRSLEESEDIIRRLEEETR

SEQ ID NO: 11559 - protein, 169 aa, Artificial Sequence; identical to SEQ ID NO: 11558
  Synthetic

SEQ ID NO: 11560 - protein, 169 aa, Artificial Sequence
  Synthetic
RKDELLRRVEEEIKKVKKRLKEMLDTDRKLIEDAERKLEEAERRDSDLIRRAKERVRDERVKEDLDRVNDKSREVVDRIKKKLREVHEKSREVVERIEEELDKVLKEVRDLGEDDRVLEELERIIEELKREIEKSLRETEKIIKELEDELRKSLEETERIIRKLEEESK

SEQ ID NO: 11561 - protein, 169 aa, Artificial Sequence; identical to SEQ ID NO: 11560
  Synthetic

SEQ ID NO: 11562 - protein, 169 aa, Artificial Sequence
  Synthetic
RSEEVLREVEKAIRRAKEELKRAVETDRRRNTEAARALEEILDTDRRLIEEAKRRLRIDDVKRLLDEAHDKSRKVVEDAKRLSNEASKRSEDVAREIEKLLDDVLREVEKLGDDEKVLRDLKKIIDDLRRRIEESLRDSERIIEKLRRDLEASLEESRRIIERLKEKAD

SEQ ID NO: 11563 - protein, 169 aa, Artificial Sequence; identical to SEQ ID NO: 11562
  Synthetic

SEQ ID NO: 11564 - protein, 169 aa, Artificial Sequence
  Synthetic
REKELLDKVKELVERAKRELERLVREDDKLNEDLKRRLTKILKEDSDRIKEVKERLKDEEVKKKLEEVNKKSEDVIRRIVEESDEASRKSKEVAKKLLDDLDRVLDEVRKLGGDDKVLEDLRKIIEDLLREIEESLRESREIIKKLEKRAKDSLKETEEIIEELERRDT

SEQ ID NO: 11565 - protein, 169 aa, Artificial Sequence; identical to SEQ ID NO: 11564
  Synthetic

SEQ ID NO: 11566 - protein, 182 aa, Artificial Sequence
  Synthetic
SEVEELLDRVKKVADESRREAKRLLDESKRVIDKSLDEVRRLLKESREVIEEVKKRVDEKRDLREMVKRLLEELKKISRESIERNKRLLEDLRRISRESLEANKELLRTLKEIVDKVIRDIRRRNADEVLKRLEDLLRKVAEEHRRITREDEELLKRAEEEHERFSKEDEDLLRKAEKEVED

SEQ ID NO: 11567 - protein, 182 aa, Artificial Sequence; identical to SEQ ID NO: 11566
  Synthetic

SEQ ID NO: 11568 - protein, 182 aa, Artificial Sequence
  Synthetic
SRVDELVKRVRDVAREVKRINDELLKRVEEVIKESRDRVRELLKKVEDVIRRAAEEIDRIRRDREVVKDLLRRLKEDVDEVIKDNERLLEEVKRIVEDVVRKAEKTLEDLRKIVEDVIRDLDRDRAKEVVREIEKLLEDVRRTSEDTVRKIRELVAEVDDDHRRASETIRRLLKEAEDRARK

SEQ ID NO: 11569 - protein, 182 aa, Artificial Sequence; identical to SEQ ID NO: 11568
  Synthetic

SEQ ID NO: 11570 - protein, 182 aa, Artificial Sequence
  Synthetic
SEVEELLKDVERVIKRSEDEVRRLEREVEKSSEDVERINRKLLRDSREVIKKVIEDVRRVKDDKDVVRKLLEDLRRISEKSVEDMKRTLDRDREIVDKVLKENERLLEELEEIVREVERRLDERRAKEVLDRIRELLETARRRHKEATKKIKRILEESEKKSRRSIEEDKRLLDEAKEEVRR

SEQ ID NO: 11571 - protein, 182 aa, Artificial Sequence; identical to SEQ ID NO: 11570
  Synthetic

SEQ ID NO: 11572 - protein, 181 aa, Artificial Sequence
  Synthetic
SVEEVVRDNERRLEEDAERTRRVARRIEKLLDELRKKVEDVIREAKERLERLLEEIGEESDVIREVEERVKKLLKRVTDLLDKVRREVEKLLRELEESLRKSEEDVRRSIEDVKRKMSDERAEDLLREVNKRNEEVIRRNKELLDEVEKRIREVIKRLEELLEKVKRELERVADELRKAKK

SEQ ID NO: 11573 - protein, 181 aa, Artificial Sequence; identical to SEQ ID NO: 11572
  Synthetic

SEQ ID NO: 11574 - protein, 181 aa, Artificial Sequence
  Synthetic
DVERVLKENKETLDEDRKRTKEVIDRNKKKLEDLAREVRKVIEEIKKRLKELLDKTGEESEEIRDVERRVRKLLREVEEALRRVEELARRTSEEAKESLRRSEETVKRSIDEVRRKMSREEAEELLRRVNKDNEKVVRENEKLLKEVLDDSERVIKELRDLLEEVRRRIEKVIRDLEERRR

SEQ ID NO: 11575 - protein, 181 aa, Artificial Sequence; identical to SEQ ID NO: 11574
  Synthetic

SEQ ID NO: 11576 - protein, 177 aa, Artificial Sequence
  Synthetic
STDEFIERLKKILRENEEKVKEVLKRNEDLLKEDEDRTRKAIKELEDKLRRVKERVERQRADERVLRELKRVVERILEELKKSLEKSKRISEEDIRAIDEWLKRSETMVRRLLKLLRDGVDVKEIEKELRRVSEESERELRKHDENTKRVSEENKERIDRLRKTLDEVIERAEERAK

SEQ ID NO: 11577 - protein, 177 aa, Artificial Sequence; identical to SEQ ID NO: 11576
  Synthetic

SEQ ID NO: 11578 - protein, 177 aa, Artificial Sequence
  Synthetic
SLDEVIRRLEETLRKDEEDTRDVIRKVRRILEENRKEVKRVIDELRRRLEEVKKRVEDSKMDERVLRELEKVVRDILRRIDEVAKESERVVRRVEEEARRSLKESKEMVERLLKLLRDGVDADTIREELRKVLEDNKRILRRLLEELKRVSEESRDRLRRLKEELERVIEEVERRAK

SEQ ID NO: 11579 - protein, 177 aa, Artificial Sequence; identical to SEQ ID NO: 11578
  Synthetic

SEQ ID NO: 11580 - protein, 186 aa, Artificial Sequence
  Synthetic
SIARKVLTDLRKIVEDLERDVERSDRDSERVVREVLERNEEVLKRLRDIVEEIKKVIREVRKDREVLKELVDRAKEVVERVKKITEELLEEVADVVRKSKKRLEDLLEELRKAVEEVKKILDRDVEDRDDVERIKRDLERILKEVARKATESVKRNERILEEVKRHAEKSTEDVERLLRELEDTVR

SEQ ID NO: 11581 - protein, 186 aa, Artificial Sequence; identical to SEQ ID NO: 11580
  Synthetic

SEQ ID NO: 11582 - protein, 186 aa, Artificial Sequence
  Synthetic
DEIEDALREARRVTEEVRREIEKSDKESEDVVREVLRRNEEVLRRLREIVKEILDELRKRREEREVLKKLVDDLARVVKEAKRITDELVEEVERVVRESKRRLEELVKEDRRVVTEVKEILKRDVEDEKRVREVLRDLERLHEESKRTVERSVERNKTILKEVRKHAETSKRELERILEDVKRATK

SEQ ID NO: 11583 - protein, 186 aa, Artificial Sequence; identical to SEQ ID NO: 11582
  Synthetic

SEQ ID NO: 11584 - protein, 186 aa, Artificial Sequence
  Synthetic
SEIDKVKKDLEKITRDVERAIKKSDDDSRKNSKEVLETNERVLEELRRIVKEVLDEIRRVRKDKEVLKRLVEEVERVAREVEEITRRLVRHNEESVRTSERILRELVKRDRDVVKEVSEIIERDVEDRDRARDVDKKIKDLHKKSEDEVRKSVKRNRDLLEESKRHAEESREDIRRLLDEVREEAK

SEQ ID NO: 11585 - protein, 186 aa, Artificial Sequence; identical to SEQ ID NO: 11584
  Synthetic

SEQ ID NO: 11586 - protein, 186 aa, Artificial Sequence
  Synthetic
SSAETVLTELRKIVRDILEKSKKSNDDLRKIVEEILKDNEDVLRELREILRRIKEKIDERREDKEELDRLVKEAEDVVREVRKRTRELVEELRRVIREVEEINRDLVRKIDKVVKEVEEILKREVEDKEKVDRIRDDIRRLLKKLRDDVERSVRDVRRILKEVKEHAERSEEEVKRLLKELRDRAK

SEQ ID NO: 11587 - protein, 186 aa, Artificial Sequence; identical to SEQ ID NO: 11586
  Synthetic

SEQ ID NO: 11588 - protein, 186 aa, Artificial Sequence
  Synthetic
DEMDKVLKDAEDVTRRVKEELRKVDEESRRVVKRILDENRRVLKELEDRVRDLRRLIREIREDKDALAELVKEVEKVVRRVDEITKKLLDDVAEVVKRSKERLEKLVEDDRRVVETVKRILDRDVSSEEDVRKIKEDLERLHRESKRDVERSARDNERILEEVKRHADESRREVKRLLDEAKEEVD

SEQ ID NO: 11589 - protein, 186 aa, Artificial Sequence; identical to SEQ ID NO: 11588
  Synthetic

SEQ ID NO: 11590 - protein, 182 aa, Artificial Sequence
  Synthetic
DDLERVLRELERLVDEIRKEIEKVDRESEELDRRVKETIKELDERSKRLVEEVEDMIRRNRDSKELLERLIRLIRKSVEDVKRTLEKLIEDSERSVKEVKDRLEKLIEDLRKVVEDLKKLADERKAPEEVVRRVEKIVRELRKTVEDSIRRNEKSVEETRREAEKSEKRNRELVKRLEEKAK

SEQ ID NO: 11591 - protein, 182 aa, Artificial Sequence; identical to SEQ ID NO: 11590
  Synthetic

SEQ ID NO: 11592 - protein, 182 aa, Artificial Sequence
  Synthetic
SEAEKVLKELEDLVRRIEEDIRRTNEEVRKLDEDVLEDIKRVDEESKKLVREIEERIRSRRDKKDELKKLLERLRRSVEEVRRRLRELIELSREVVKRNEDRLKKLIDDLRRRVKELEKVIDERKFPEEFVRRLEELVKRLADKVKESVDTSRTSVKRTEDEARKSVRRNEDLVRRLEEDAK

SEQ ID NO: 11593 - protein, 182 aa, Artificial Sequence; identical to SEQ ID NO: 11592
  Synthetic

SEQ ID NO: 11594 - protein, 182 aa, Artificial Sequence
  Synthetic
SELEKVLEELERLVKRIEEEIKRTNKEVRDLDEEIRKAIERSNRETERLAREVLERIREERDSKELAKKLIEDVRRVVEESKKELKRLIEESRRVVEKNERDLRRLIEELRRVVKELEELADRKKAPEEVVRRLEDLVRRLEESVERSVRTSRKSVKETEDRIREVERHDERLVEELERAAK

SEQ ID NO: 11595 - protein, 182 aa, Artificial Sequence; identical to SEQ ID NO: 11594
  Synthetic

SEQ ID NO: 11596 - protein, 182 aa, Artificial Sequence
  Synthetic
SDLEDVLRKVEDLDRKIAEDIRRTNEDVKRLDEEIEEKIRRSNEKLRELVRRVLKAIRDRRDDKDLIKKLIEELEEALRRNEELLRKLIEESRDVVRKNEKVLKDLEDESRTVVDELRELADRKKAPEEVVRRLEESVRRTKERIDRSLKTSRDSVRETERKIKESKDTSEKLVKDLRDAAK

SEQ ID NO: 11597 - protein, 182 aa, Artificial Sequence; identical to SEQ ID NO: 11596
  Synthetic

SEQ ID NO: 11598 - protein, 178 aa, Artificial Sequence
  Synthetic
SEVDDILRRLREIDEKLLRENEESLKRLKDEVDRLKRKNEKSLDDLRKLVEKLIDDLRKRKEVEELARRVDDEARRVLKRNKEVVERIREELERVLRRNKEVVETIRKLSEDVVDELRSGGVDEKVLEEVKRSVDRTRDHLRKSEEDVRRLLDELRRHLEDSERRVRELLRKLREKVR

SEQ ID NO: 11599 - protein, 178 aa, Artificial Sequence; identical to SEQ ID NO: 11598
  Synthetic

SEQ ID NO: 11600 - protein, 178 aa, Artificial Sequence
  Synthetic
SKVDEILRELKRLVDELLRRIEKTLKELEDLVRELLKENTRSLEELRELVERLLEELRRRKESEELVRRAIKAVRDVLEKNRDVVRRIKEELRRVLEENREVSREVIELARKVLDELRRGGVDREFVERVRELLKRLEDELRKSNRTIEKLLRDLARHLEDSIRRVEELLRELEEKAT

SEQ ID NO: 11601 - protein, 178 aa, Artificial Sequence; identical to SEQ ID NO: 11600
  Synthetic

SEQ ID NO: 11602 - protein, 178 aa, Artificial Sequence
  Synthetic
KEVEDILRELEKIAKDLRDEIRESDDESRRLVEELLKRSEDTLKELRDLVKKLLDRLRERKESEDLVREIRKRVKEVLDKNREVNDEIIKRVAEALKKTRKVLEKVKELVKRALEKLRRSGVSEEVVKRVEELIRRVEEEVRRSTRRNEKLLEDLRRELERSDRELEKLMDDLRRKLK

SEQ ID NO: 11603 - protein, 178 aa, Artificial Sequence; identical to SEQ ID NO: 11602
  Synthetic

SEQ ID NO: 11604 - protein, 178 aa, Artificial Sequence
  Synthetic
DDVEKILEDLKRIDTELTKRTRDSNKELEDEVRRLMERSRRTLKELEDEVRKLLDRLRKRKESEELAREVERRAEEVLEKNRRVNKEIIKRARDVVEKNTRVNKKIKDDSREVVKRLEDRGVDRKVLEDVRRSLERTERELRESDKSVKKLLDELKEELDRSDREVERLLEELRDAVR

SEQ ID NO: 11605 - protein, 178 aa, Artificial Sequence; identical to SEQ ID NO: 11604
  Synthetic

SEQ ID NO: 11606 - protein, 178 aa, Artificial Sequence
  Synthetic
SEVDEILRKLRELVKELIRRTEESNEKLRKLVEDLRDESRKSLEELRELVERLADELRKRSESEELARRVIRRVEEVVRKNSDVNRRIIEAVKRVVDENTEVNKEIIEEAKRVVEELRRSGVEERVVREVEELLKELKRRLEESDKSVAELLRRLEKDLRESDRRVEELLKRLEDEVK

SEQ ID NO: 11607 - protein, 178 aa, Artificial Sequence; identical to SEQ ID NO: 11606
  Synthetic

SEQ ID NO: 11608 - protein, 178 aa, Artificial Sequence
  Synthetic
SEAEKILTELEEIDRRLVKRTEDSNRKLRDTVRKLEEESKKSLEELRELVDRLLKRLDERKESKELAEEVIRRVEEVVRRNSEVNKRIEDEVKRVVEENTRVNEEIRETSREVVKRLEDSGVDREILERVRESLERTDKRLRESDESVKKLLEDLKRKLEESDRRAERLLEELRKRAT

SEQ ID NO: 11609 - protein, 178 aa, Artificial Sequence; identical to SEQ ID NO: 11608
  Synthetic

SEQ ID NO: 11610 - protein, 181 aa, Artificial Sequence
  Synthetic
SELEEVLKRVEETVRRLTKRLEESLEETRRIVDKLREDLRRSLERTERIVRELTEKLGGTDEARELLKRANEHDKRVVDEIRKRLEEALEKDRRLVDEIRERLKELLEEVKDVVDKIRSKGREEELREVEKKAEKLVRELEERLKRVIEDSERLVTDLKEKLERVLETSKKLLADLEERAR

SEQ ID NO: 11611 - protein, 181 aa, Artificial Sequence; identical to SEQ ID NO: 11610
  Synthetic

SEQ ID NO: 11612 - protein, 181 aa, Artificial Sequence
  Synthetic
KELDEVLEKVKRIVDELERKLERSLRETKRIVDELREELKKSLKETEDIVRELERDLGGTKEADKLLEELLRRDKEVVRRIKEELERMNEHDRRVVEEIKELLERALEEVKDVVRRISKEGRDERLTEVEERAKRLVDTLAEKLKEVERRSEELVKTLEEELRRVLDTSRRLVEELREKAR

SEQ ID NO: 11613 - protein, 181 aa, Artificial Sequence; identical to SEQ ID NO: 11612
  Synthetic

SEQ ID NO: 11614 - protein, 181 aa, Artificial Sequence
  Synthetic
SELEEVLKEVEEIVRRLEEELRKSLKETREIVTKLLKKLKESLEDSERIVRELSRKLGGTDEARKLLEEANDHDRRVIEEIKRELKRLLDKDREVVKKIEDELRKLLKKVREVVERLKDKGRDEEARKVLETAKKLVDDLKRKLERVKEESAKLVDELRKELRRVNERSKELVEKLEREAK

SEQ ID NO: 11615 - protein, 181 aa, Artificial Sequence; identical to SEQ ID NO: 11614
  Synthetic

SEQ ID NO: 11616 - protein, 181 aa, Artificial Sequence
  Synthetic
SELEKVLREVEEEVRRLKKKLKESLDRTKEIVDRLKKDLKRSLDETKKIVDELREKLGGRKEADELLKRANEHDKRVIDKIRELLERALREDERVVREIRKRLKELLERVREVVERLKDEGRDKDLKDVERKAEKLVEDLDRELKEVEKTSRKLVKELEAELREVDKTSKKLVDDLRKDAK

SEQ ID NO: 11617 - protein, 181 aa, Artificial Sequence; identical to SEQ ID NO: 11616
  Synthetic

SEQ ID NO: 11618 - protein, 189 aa, Artificial Sequence
  Synthetic
REVEELLKEVEESTRTSKKIIEDLLRRVKESSDKSKKDIRRLLEEVRRIVDTVRKILERRGKKDKDAEKIIEDVERRVREVLERARRLSEENEKLVREVLRRLEESTRRDEKLVREVLKRARDSVREEELEKRVREVEETLKRLVDENRETLERVARKAKRLVEDDKRDLEEVVRELEELLKRLKEELD

SEQ ID NO: 11619 - protein, 189 aa, Artificial Sequence; identical to SEQ ID NO: 11618
  Synthetic

SEQ ID NO: 11620 - protein, 189 aa, Artificial Sequence
  Synthetic
SSVDRLLERVKRTTDESKERVERLLERVKESSERSEREIKRLLEEVERIVREVKKEVERRGKDAEDVRRIIKEVEDRVKRVLEDVRRSTDEDRKLLDRVREEVRKISEDNAREVEEVLDEVRKQSREEEVEKRVREVERTVEELVKEDREAVKRVEETIRRLLKKNEDTVKKVEDDLRKLLEDLKRDVK

SEQ ID NO: 11621 - protein, 189 aa, Artificial Sequence; identical to SEQ ID NO: 11620
  Synthetic

SEQ ID NO: 11622 - protein, 188 aa, Artificial Sequence
  Synthetic
SEIEELLRRVKKVNDESRERIKELDKRSREVNERSRRKNEELLKRVEEVVREVEERIDRTRDKETVRRLIEELEEIMREAVRRSRKSSEELRKRVEESVKELKRSSDELRRIVKEVIEEAKRNSREKELEDRVRDAVRRLERSLKENEDRVRESIERNKDSVRRNEEHVDESIKRLEKEVDRVRKRAE

SEQ ID NO: 11623 - protein, 188 aa, Artificial Sequence; identical to SEQ ID NO: 11622
  Synthetic

SEQ ID NO: 11624 - protein, 188 aa, Artificial Sequence
  Synthetic
SEIEKLLEDVRKVAEEVKRAIDRLNEENKRVNEKSKERIDRLLEEVRKVVEEVLRRVKTSKDKKTLDELLKELRKDVKRVVDEARKSSEELEKISREVNETLKELLERLRRIVEEVIKEAERRTREEEVEKRVRRVVEKLREIVKEVEEKVRRALDENRRSLEENRRRVKRVIEELEKILKEVEDEVR

SEQ ID NO: 11625 - protein, 188 aa, Artificial Sequence; identical to SEQ ID NO: 11624
  Synthetic

SEQ ID NO: 11626 - protein, 181 aa, Artificial Sequence
  Synthetic
DEVEEMEKELKKLLDDSKRRSDELIEEMRKLNEESKKRSRELEKRLRDINKEIRDRLDRDKAREVLRKSERVTEESRRLAEESDKKSEDVTRRSADRLRRVNKKVADVVERIKELLDEKRDDSKLLDDLRKTIEKVIRESRELLEELRKENERVIEESEKLLRDLLRENEKVAEEVRRTAT

SEQ ID NO: 11627 - protein, 181 aa, Artificial Sequence; identical to SEQ ID NO: 11626
  Synthetic

SEQ ID NO: 11628 - protein, 181 aa, Artificial Sequence
  Synthetic
SEVEELIRRLEKLLREVEKRARRLIEEAKRLNDESNKESRRLIEELERLVEDVAREARRDKVKELLRKLREVVKRIVEALERSDRKSKEVTERSVRLVEKAVRDLERVIREIVKRADEARDDEKLLRDLERAIRDVVRKLEELLRRLREENERVIKESEELLERVRKEIEDVLREAREAAR

SEQ ID NO: 11629 - protein, 181 aa, Artificial Sequence; identical to SEQ ID NO: 11628
  Synthetic

SEQ ID NO: 11630 - protein, 181 aa, Artificial Sequence
  Synthetic
SKVEKLITELEKLLKDSNKKTEDVERELERLNKKSNDDSRRIIEEHKKIVEEIARRVTKDKARDALREARRNVEENRELVERSDKKSKDVTEKSRKAAKESDDRLEEVIREIKRRLDEFRDDEELLKRLKDRIKKVVEESEKLLRDLVKENREVIKESEEILRRLAENLKRVKEEVDRRTT

SEQ ID NO: 11631 - protein, 181 aa, Artificial Sequence; identical to SEQ ID NO: 11630
  Synthetic

SEQ ID NO: 11632 - protein, 181 aa, Artificial Sequence
  Synthetic
EEVERLIKELDDLLRRSNARTRDLIRKADEELRRSNEESRRIVERMEEINKRIADEVQRDKAKDVLEKSKEVTKKSKRLVEESDRKVEEVIREIRKRAKESDEKVKRVIEEIRERLDRKRDDKKLLDDLKRKIETVIKESEDILRKLEEDLKRVIEESKELLDRLLEENKRVMEEARRRTK

SEQ ID NO: 11633 - protein, 181 aa, Artificial Sequence; identical to SEQ ID NO: 11632
  Synthetic

SEQ ID NO: 11634 - protein, 177 aa, Artificial Sequence
  Synthetic
DEVEEIKKEAKRIVEDLKRRNEELKRRLERLVEEVKKRNEESKKRLEDIVRKIKEDIKDGRSEVVKEVEEIIDRLVKESEKSLRDLEKTVEDLVRDSRRSLEDARRIVDELLKILDRGDKDLKEVRKTLEKARKENEDVIRKIEEDAKEVLRRDEESNRDINRKVDEVRKRVEERRK

SEQ ID NO: 11635 - protein, 177 aa, Artificial Sequence; identical to SEQ ID NO: 11634
  Synthetic

SEQ ID NO: 11636 - protein, 177 aa, Artificial Sequence
  Synthetic
REVEEVKKDLERIVEEVKKRNEELKRRLEELLKENKRRNEKSDEDLKRIVDRIDERVREGRKEVVDEATRIVEKLRKDSEKSLRDAKRRIDELMRRSDESLKRLEDIIRRLLEILDRGDKDLKDVKRVVEKVRRENEKVLREILTDAEKVSRDDETSNRDLNRKLEEARERVERKAK

SEQ ID NO: 11637 - protein, 177 aa, Artificial Sequence; identical to SEQ ID NO: 11636
  Synthetic

SEQ ID NO: 11638 - protein, 177 aa, Artificial Sequence
  Synthetic
SEVEEIKERLKRLVEEVERRNRKVIRESEETVKENEKENRKSKKRLKEILDEIVERIKDGRSEVVEELERIIRELARRSEKSLRDVERISRKLVKESRDSLRELKRRIEELLEILDRGDKDLKDVKRDVERVLKENKEVLDRLRKEDEEVSRRDKKSNEDINRVVEDVKRKLEEKAK

SEQ ID NO: 11639 - protein, 177 aa, Artificial Sequence; identical to SEQ ID NO: 11638
  Synthetic

SEQ ID NO: 11640 - protein, 177 aa, Artificial Sequence
  Synthetic
SEVEKVKEDLKKLVKEVEDRNRESKRRSEETVKENTKKNEDSKRRLKEIVDRIREEVKEGRDEVVKKAERIVEDLARRSEESLRRMEKISKDLVRESKRSLDELKRIIEELMEILDRGDKDLKDVRREVKRVLDEDKDTNDKLNDRDRKASEEDERSNRELNKTIARAEEEVKEARR

SEQ ID NO: 11641 - protein, 177 aa, Artificial Sequence; identical to SEQ ID NO: 11640
  Synthetic

SEQ ID NO: 11642 - protein, 177 aa, Artificial Sequence
  Synthetic
KEVEDVKEKLKELVERNRDENRKTKEELRRLVEKNRKENEESKKRLKEIVEEIRERVKEGRSEAVERVRKTIEDIMEDLDRSLRRVEDIVTKLAKESDDSLRRVEEIIRELLKILDRGDKDLREVEKTAEKVSKEDKETNDRIRKDLKKVSDEDKRSNEEVNKRVDKVRKEIEEERK

SEQ ID NO: 11643 - protein, 177 aa, Artificial Sequence; identical to SEQ ID NO: 11642
  Synthetic

SEQ ID NO: 11644 - protein, 170 aa, Artificial Sequence
  Synthetic
EESERLDELIKEVVERVKKLNEEARELIKDVLRRNEEVNTRLEELNRKVEKEVREEKDKDRLVRRAEAVSKTTEDLVRETIEEAKEVVKEVRDLVRRSNEDLRRVVEEVRERGVDRKVLEKIRRALEKVHEDNRRSIRDVERMLEKVEDDNRKTIERSRRLVKRVEEELR

SEQ ID NO: 11645 - protein, 170 aa, Artificial Sequence; identical to SEQ ID NO: 11644
  Synthetic

SEQ ID NO: 11646 - protein, 185 aa, Artificial Sequence
  Synthetic
RSLEELKKEVERVARAVRKVSEDNKRLLDRVREEVKRVSKENRDLVREVERRVEEVKRRVEDRKELKERVTKLLKELEDSSREVIKRVEELIDRMRRSSKEVEDRVRELLRELERVVRDVKRKVKDLERVDRLKEEIEEILRDLERKVRENKERSKKIAEDLRKHAEDNAREVKKALRDLEEKVR

SEQ ID NO: 11647 - protein, 185 aa, Artificial Sequence; identical to SEQ ID NO: 11646
  Synthetic

SEQ ID NO: 11648 - protein, 182 aa, Artificial Sequence
  Synthetic
SELERVLREIREVSRETRERSERSLEEIRRVVEDVRRKNKESLDRNREVLEEIRKALEKGPEELMRELLKEIKESSRESNRTSDESVEEVRDVARKVERRNEELLERSRRVAKRVEEEARRAPEDRVERVKRELERLVEENERIVRESRKTLEKLVRDVDRTSKRVKDENRKLLRRVEEEAR

SEQ ID NO: 11649 - protein, 182 aa, Artificial Sequence; identical to SEQ ID NO: 11648
  Synthetic

SEQ ID NO: 11650 - protein, 182 aa, Artificial Sequence
  Synthetic
SEVEDLLRRIRKVVEEVERRSRDSLRRNEEVVKEVEERSEKSLRDDKKVIDDVKRRLREGPEEEVRRLLDEVRKSSEDVVEENRRLLKRVEESSREVVKINDRLLEEVRRVVREVLEELRRAPKDEVRKAEEELRKLVRKAEEVVKKSKEDLERTTRKVEKVVRKSEEDSRRLLREVAEEAR

SEQ ID NO: 11651 - protein, 182 aa, Artificial Sequence; identical to SEQ ID NO: 11650
  Synthetic

SEQ ID NO: 11652 - protein, 182 aa, Artificial Sequence
  Synthetic
SKLDKILEELRRIVEEVKRRSEESLEEIERVVEEVKRRSRRSNEELKRIVDKIKKDLRDGPKELIRELLKEIERVAREVKKINRDLLEDVKRVVDKVRRENEKLLEDVRRVVEDVKRRISEVQEDDVDRVRREADKIVEDVRRVVERSKRRLDELRRDAEKVVRDSERRIDRIVDDVRRTAK

SEQ ID NO: 11653 - protein, 182 aa, Artificial Sequence; identical to SEQ ID NO: 11652
  Synthetic

SEQ ID NO: 11654 - protein, 182 aa, Artificial Sequence
  Synthetic
SDLEEVLKKLEDILRKIKETNDKALREIEEVLRRVKERSRRSNKEAEKVLREVEKMLEKGPKELARKLLEEVERVVRKVTEDNDRLLKEVEDVVRRVEELSRESLKTIEKVVRDVARDVERVEEDEVRRIKERLERLLRTAERVSREIKKRLEELVDDVRREVKRSKDRLKRLVDEVAERVR

SEQ ID NO: 11655 - protein, 182 aa, Artificial Sequence; identical to SEQ ID NO: 11654
  Synthetic

SEQ ID NO: 11656 - protein, 182 aa, Artificial Sequence
  Synthetic
SKVDEILKDIERVVREVEKKSRKSNEELKRISEESKRRNEDALRRLKEIADRVRERLDKGDKEEVRELLKTVRDVVKKVKEESDRSVKRSEEVAEEVKRRNEALLKEVEDVARDVEEKLREAPEDKVRDARRRLKELVDRVKRVVEESEKRIRKLVKENRDVSRRIEEELKRIVREIEEEAK

SEQ ID NO: 11657 - protein, 182 aa, Artificial Sequence; identical to SEQ ID NO: 11656
  Synthetic

SEQ ID NO: 11658 - protein, 182 aa, Artificial Sequence
  Synthetic
SKLEEILKKVEKVSEDTKRKSEDSNRRIKKVSDESKELNKKALRDITEMAKEVDRVLKEGREDEVKKLLDEVREVVERVRKISEDSVRRSEEVVRRVEEINRELLKDSKRVVDEAAERIREAPEDRVDEARRRLERLVEDNARVVKRSEDELRKLVEDNRRVSEEIERKLKELLKRVAESVT

SEQ ID NO: 11659 - protein, 182 aa, Artificial Sequence; identical to SEQ ID NO: 11658
  Synthetic

SEQ ID NO: 11660 - protein, 182 aa, Artificial Sequence
  Synthetic
SKAEEALKELERVADEARRASEKSNREAKKAADDAKRASEKSLREAERAAREAEKALREGPEEDARRLLKEVEEVARRAAKINKELADRVRKVAEDAARINDKLLEEVRDAARRAKEAAREAPKDDAKRIKDEADKIVKRAEDAARESKKRLKRLVEDAERAAKESKEELDRLVREAEEKAR

SEQ ID NO: 11661 - protein, 182 aa, Artificial Sequence; identical to SEQ ID NO: 11660
  Synthetic

SEQ ID NO: 11662 - protein, 178 aa, Artificial Sequence
  Synthetic
SEVERVLKELEDLIRKLEEEIERSLRELEKLIEELKKEIKESLDELEKLIRDLIRRLDERKESEELAREVRELVRRVLEKDREVLERVIREVRKALEKNKRVLDRVRKLVEEVLEKLRRGDVSEEADKRAKELLDKLRKVIEKSKEDSRKILKDLERTVKRSEEESRKVLEKLERRVQ

SEQ ID NO: 11663 - protein, 178 aa, Artificial Sequence; identical to SEQ ID NO: 11662
  Synthetic

SEQ ID NO: 11664 - protein, 178 aa, Artificial Sequence
  Synthetic
DEVERVLRELRELIKRLEEEIRKSLKELEDLIRRLIEEIEETLKKVEKIIRELKARLEERKESEELARKVEEDVRRALKENKRVLEEVIRRVRKVLEDDRRVLEEVIRRVEKMLEDLKKAGVSDELREEAKKLLRRLEKTVEKSKRDSEKVLRDLEEVVRESERASKELLKDLKRKVD

SEQ ID NO: 11665 - protein, 178 aa, Artificial Sequence; identical to SEQ ID NO: 11664
  Synthetic

SEQ ID NO: 11666 - protein, 189 aa, Artificial Sequence
  Synthetic
SELERLLREVEKSSRESVETSRKLNEEVEKTTRESKRRIEELLRRVEKIVDEVKKVIDRDGKDSEEVRRIVEEVKKFIETILEEIKRSSEEDERRIRDVLRKSEKSSEDDRRLLDEVLKEVARRTRTDEARERLRRVAEEIKRLAKENKRVAEESKRRAKELLDDNKDTVRRVSERLKELLEDLDRKLK

SEQ ID NO: 11667 - protein, 189 aa, Artificial Sequence; identical to SEQ ID NO: 11666
  Synthetic

SEQ ID NO: 11668 - protein, 189 aa, Artificial Sequence
  Synthetic
DEIEDLLRRVRKTTEESKKRSEDLNKEVKDSTREVKKRIKELLEEVERRVKEVKERMERDGLKSEEVKRIVDEVERELERVVDTVRKIVEDDKRLIEDVVRRSKDLSRRDVELIKTILKEIEDRSRTEEAEKRVRRAKEEAERLIRDNERKLKESEEELRRLIKETEDVLRKAEEDIRRILADLRRRLK

SEQ ID NO: 11669 - protein, 189 aa, Artificial Sequence; identical to SEQ ID NO: 11668
  Synthetic

SEQ ID NO: 11670 - protein, 189 aa, Artificial Sequence
  Synthetic
SEVEKLLEDVRESTKRVKELSKRLNEEVERTTKESEDRTRRLLEEVKRIVEDVKDKLRKRGKDSEDARRIVEEVKKRIREIVETSTRLSEDDKRLIEEVLKESERIVREDEELLRRVLEEVERRSRTEEAKKRVKEISDEIRKLAEETREVLERSEKRLRELIRRNEKVNKEVAERLEEILRDLDRKLR

SEQ ID NO: 11671 - protein, 189 aa, Artificial Sequence; identical to SEQ ID NO: 11670
  Synthetic

SEQ ID NO: 11672 - protein, 174 aa, Artificial Sequence
  Synthetic
REKEDAKRRLEEILREVKKDLDRVHRENEKLVEDTARTVERIKRELKKLLDRAREVPVEEELIKEIEKIVEDIVRRVEELLRRDKKVSDDVSREVRRLVEDLRRIVETVVELVKAGMDIEELRKRVEDVVRRVKEELERLLKENEDSTREVKKEAERLLDEIRKVLEKVERDAK

SEQ ID NO: 11673 - protein, 174 aa, Artificial Sequence; identical to SEQ ID NO: 11672
  Synthetic

SEQ ID NO: 11674 - protein, 174 aa, Artificial Sequence
  Synthetic
REKEEAEDRMRRILEEVRRTLEEVHKENRRLLEDTRRTVERIERENRKIVEEVRRVPVDEKLVKKAEDISRRVTEEVRRLLDEDRRVSEEVSRRAEELVRRLEEIVRRLLELVREGMDIETLERRVREVVERVKKELERLLRENKKSTEEVKRTAEDLLRKNREVVEEVKKAAK

SEQ ID NO: 11675 - protein, 174 aa, Artificial Sequence; identical to SEQ ID NO: 11674
  Synthetic

SEQ ID NO: 11676 - protein, 184 aa, Artificial Sequence
  Synthetic
DEVEELERRLEELLKKSRDEVTKLADELDRVLERSREVVKKDRESLKEILKEVERLVREKNDERLKEAVDELRKVVEEIERRNEKAVRENEEVVRDVKRRVKEVVEENERVVRKIKDVLRDKDKSKELLDRLEKELRESVKRSEERLKELADRIRKSLEDSERLSRRTNERIKRVLEEVTERVK

SEQ ID NO: 11677 - protein, 184 aa, Artificial Sequence; identical to SEQ ID NO: 11676
  Synthetic

SEQ ID NO: 11678 - protein, 184 aa, Artificial Sequence
  Synthetic
DEVEDVSRKLDEALERSRRITEDLEKKLREVIETSKREVDKLAERLDEVIREIEERIRKKNRKELEELLREAREVVKEVKKRLEDLLRRNEKVVREIRETVERLNEELREVAKRVRDVARKEDKNKELIEKLEEDIRRVLEKIKREHERLLRKIEESLKDSKRRLDKLRRDIERILERIREALR

SEQ ID NO: 11679 - protein, 184 aa, Artificial Sequence; identical to SEQ ID NO: 11678
  Synthetic

SEQ ID NO: 11680 - protein, 178 aa, Artificial Sequence
  Synthetic
REIEEALRELEEVLRKVKEDNKRLEEEIRRVLEEVKRINEKLLRDAKKELDRVKEILKDTRDEKAVREVLKEVEDVVRRVKRMSEESVKEVERVVRELVERSRRSLEEVRRVVRRLLERVKDVEEAKKELRRLVKEVEDVVRTSTRRLEELVKEVRRVSEETKRALDELVKEVREEVR

SEQ ID NO: 11681 - protein, 178 aa, Artificial Sequence; identical to SEQ ID NO: 11680
  Synthetic

SEQ ID NO: 11682 - protein, 178 aa, Artificial Sequence
  Synthetic
DEIEDVERKIKEVVDRVRDINRRLRDTIRRVLEKVTRINEELRDTVRKVLKEVERILREIKEESKVEEVLKRVREVIEKLARDSRDSLREVERVARELKERSKKSVEDVKKVADDLVREIRESEEIKEKLERLVREVKRISEESAKDLERLVREVEKVVEDSERELRRLVEEVERRRK

SEQ ID NO: 11683 - protein, 178 aa, Artificial Sequence; identical to SEQ ID NO: 11682
  Synthetic

SEQ ID NO: 11684 - protein, 178 aa, Artificial Sequence
  Synthetic
SEIEKVRKEIDEVLKRVRKINEDLLRELEEVSKRSKDINDDDLRTNTEVLKEARRILKDSTDERLVEEALKRVEEVTERNVRSSRKSLEESERVVRRLLEASRKSLEEVRKVAKEIKEKIKDSKDVTKELDELVREVEEEVRRSKDTLRRIVEENREVVERSERKLKKSSDDVREERR

SEQ ID NO: 11685 - protein, 178 aa, Artificial Sequence; identical to SEQ ID NO: 11684
  Synthetic

SEQ ID NO: 11686 - protein, 189 aa, Artificial Sequence
  Synthetic
SELEKVLRELEENSRRNEEELRRSNDKVRRVLDEIRRKLEEVLRKVEEVLRRIEEELSDKKDDRVAKEVIKRVEDVLRDLDRILKEVIKKVETVLREDERIVEELLDNIRKVLDRLRDILEEVKRRREDVKDKVKKAEDDVRRLLERNRRLVEESKKSSEEFLRRVEKLVDDARKKVEDALRKVRETAR

SEQ ID NO: 11687 - protein, 189 aa, Artificial Sequence; identical to SEQ ID NO: 11686
  Synthetic

SEQ ID NO: 11688 - protein, 189 aa, Artificial Sequence
  Synthetic
SELEKVLRDLEKNSRENEELLRRSNKKLKDVVDKIKKKLERALEELREVLEKIRRELSRSTDRKVAKEVIERVERVLRKLEEILRRVIREIEEVLREDREILERVIRNIEKVLEELKEIVREVRRRREDMDDKVRKAEEDVKRILDENRDLVRRSEENSKRLLERVRELVERVKDAADKLLREVREEAR

SEQ ID NO: 11689 - protein, 189 aa, Artificial Sequence; identical to SEQ ID NO: 11688
  Synthetic

SEQ ID NO: 11690 - protein, 189 aa, Artificial Sequence
  Synthetic
SELETVLRELEENSRRNEELLRRSLDRVRRVLEDVTKKLREVLEEVRTVLEDVKRKLSRVTDKKEADKLIERIERVLKKLEDILRELIRKAERALEEDKRILDDVIRNIEEVLKKLDKILEEVKRRSDDVRDKVKEAKDRVRKILEDNRRLVEKSEEDSKRILETLRKLVEEMKRELERIETELREAAR

SEQ ID NO: 11691 - protein, 189 aa, Artificial Sequence; identical to SEQ ID NO: 11690
  Synthetic

SEQ ID NO: 11692 - protein, 189 aa, Artificial Sequence
  Synthetic
SELETVLRKLEENSRRNKKLLRDVLEEDKTVLRDVERKLREVLDELRKVLEDIRDKLSRKTDDRVAKEVERRVREVLKKLKKILEDLIRKMEDSLRKLKEILKRLIENAERVLRELEKILKDVKDRREDVKDKAETMKKAVEEILDRNRKLVTEAEKRSEDSLRKLRKSVKEVEEKVKRVLEEVKKEAD

SEQ ID NO: 11693 - protein, 189 aa, Artificial Sequence; identical to SEQ ID NO: 11692
  Synthetic

SEQ ID NO: 11694 - protein, 189 aa, Artificial Sequence
  Synthetic
DELERLLEELERNSRENKKRLDESRKRVKEVLDRIEKKLRDVLREVEDVLRKIREKLERKRDDRVAKEVKRLIEDVARKLEKILKEVTDAVKKVLDENKKILEDLIRNIEEVLKKIERILEEVKRRAEDVKDKVKELRDRVKELLDRNREEVRKSEEDSKRVLDEVKRLVDELRERLREIRKRVEEEAK

SEQ ID NO: 11695 - protein, 189 aa, Artificial Sequence; identical to SEQ ID NO: 11694
  Synthetic

SEQ ID NO: 11696 - protein, 189 aa, Artificial Sequence
  Synthetic
SELEDVRRELEENSRRNEETLRRSLAELEENSERNRRELERVLAEVEKVLKKATETLSRVDDKEVARRLEDEARKVLEDLERILRRLIENIRRVLEKNKKIAEDLIRNLERVLEKLKEILRDVDRRRKDVRKEVKKVEDDVRRILEENRRLVEESERRSRRILEENEELVEDIKRKLREIEKELRERVR

SEQ ID NO: 11697 - protein, 189 aa, Artificial Sequence; identical to SEQ ID NO: 11696
  Synthetic

SEQ ID NO: 11698 - protein, 183 aa, Artificial Sequence
  Synthetic
SEVEELEREIRELVERNRELVRRLEEEARRLSRRNEELVRELKERAERLVKELKERLDRVDREELKKIADRVRREAERLVEDVRRSSRKVSEENKELVKEVRKSSTEVIKRLEDLVEKVRRDNDKDTLDEVRKEVRKLSKENEERLREVLEESRRLSKRNEEILKEIAERVKRLVDKLTDDIR

SEQ ID NO: 11699 - protein, 183 aa, Artificial Sequence; identical to SEQ ID NO: 11698
  Synthetic

SEQ ID NO: 11700 - protein, 175 aa, Artificial Sequence
  Synthetic
SEVEDVERRVRKLLEENDRLLEENEKSARELMKRDKKVSDENEKSVRDLLDRLRKEIRDEDVVRKVEEILKDLLRKDREVSKENIKILKELLDRSRDSSRRVRETLKRLLDKARKDKDVLEELLKKLRKLSEDNERLLRESNERAKRSTDESERLSRETNERVKDVVTRLKEASK

SEQ ID NO: 11701 - protein, 175 aa, Artificial Sequence; identical to SEQ ID NO: 11700
  Synthetic

SEQ ID NO: 11702 - protein, 175 aa, Artificial Sequence
  Synthetic
DEVDEARKEVDKLAKENTELVKRNKDSVKELVREDEDELRKNRESVDELLRRLEEEIRDERVVEDVIRKLEKLLEDSTRASEENKKRLEDLLRESEKSSRDVKKLLDDLLKKLKDVEGVLEEVLKTLREVSDRNKKLLEESNERVRKSTKESKDKLRKSNEEVKRVLKELRDTDT

SEQ ID NO: 11703 - protein, 175 aa, Artificial Sequence; identical to SEQ ID NO: 11702
  Synthetic

SEQ ID NO: 11704 - protein, 180 aa, Artificial Sequence
  Synthetic
DELDRLLEEVKRSLEDVEEKLKKLEEEVKRVNDELRKRLTRLLREVERSLKRVEDLIRNGEPKEDILREHERSVKEVLKEVRKVVTEVEEAHKRVMREVERVLREHEETVKRVLEDVTRRNGEKLEEVRERLKESLDRLRKRVEDLKRRLRESLESVRKLVEDLERALRKSLEELRERVR

SEQ ID NO: 11705 - protein, 180 aa, Artificial Sequence; identical to SEQ ID NO: 11704
  Synthetic

SEQ ID NO: 11706 - protein, 180 aa, Artificial Sequence
  Synthetic
EELDRLLKRVEESLRRVERILKELLDRVRKVNEDVKRTLDDLLRRSKESLDRVRKLREEGKDKDTVLKEHEKSLRKSTEDAKKVIREVEKVHKEVLDRVRKVLREHEKTVREVLEAVRRRNGEKLEEVEERLKRSLRELERLVRELEEELKKSVKSVRDLLEELKRRNEDSLRRLAEEIK

SEQ ID NO: 11707 - protein, 180 aa, Artificial Sequence; identical to SEQ ID NO: 11706
  Synthetic

SEQ ID NO: 11708 - protein, 180 aa, Artificial Sequence
  Synthetic
KELDDLLREVERSLDRVRKRLEDLLREVERVNEEVKKRLRDLLEELKRVADELRKLREDGKPKEKVLEELERAVKRLIDEVRRVIKEIEKFHKDVLDDVRRVLREHEETVKEVEERVRRRNGEKLEDLERELKRSLKELRDEVRELEERLRRSVESVRRVLKELEERARRLLKEVRDEIK

SEQ ID NO: 11709 - protein, 180 aa, Artificial Sequence; identical to SEQ ID NO: 11708
  Synthetic

SEQ ID NO: 11710 - protein, 180 aa, Artificial Sequence
  Synthetic
SELDKLLEDVKRSLDEVKRLLKELLDRVKKVNKELEEVLKRLEEDSRRVVEEVEKATRDGKDKDTVLKKLEDALRRSTEEVRRVLREVEEVHERVRKEVRRVIEEHRKTVKDVLDKARKRNGEKLEDLERKLEDSLRRLEELLRRLEDELRKSLTSVRKRVKELEEKNRELLKRVEEKIR

SEQ ID NO: 11711 - protein, 180 aa, Artificial Sequence; identical to SEQ ID NO: 11710
  Synthetic

SEQ ID NO: 11712 - protein, 180 aa, Artificial Sequence
  Synthetic
KELDELLKRIEDVVRRLEEELKRLLDEARKVNEDLERRLRKLREDVERSLREVDKMIRNGKPKEEVARRHEESVKEVDKDVKKVLKEVADRHREIVKRVEEVLRRAERVVEEIKREVRRRNGEKLKDLEKALEELLDRVRRLVKELRDRLRDSLRSVEEEVKKLKDELDRSRKAVRDKVK

SEQ ID NO: 11713 - protein, 180 aa, Artificial Sequence; identical to SEQ ID NO: 11712
  Synthetic

SEQ ID NO: 11714 - protein, 180 aa, Artificial Sequence
  Synthetic
SELDRLLERVRKSSTDSEKTLKELRDEIRRVNDEVRKVLEELLKESRRVAEEVKKVIDNGEPKEELLKTLEEVIKKSTKDVRDVIRELRRIHEEVLDRVRKSSRKNEESVRKIEEDARRRNGEKLEDLERELRRLLRRDRELVKKLEEDLRRSLKSVEEEARRLERANRELLREVEEKAK

SEQ ID NO: 11715 - protein, 180 aa, Artificial Sequence; identical to SEQ ID NO: 11714
  Synthetic

SEQ ID NO: 11716 - protein, 180 aa, Artificial Sequence
  Synthetic
SELDKLLRDVEESSRRSEETLRKLEKEVRDSSTESERILRELRDRIKKVADDVEKVIRDGKPKEKLVEDAKEFVREVEERVRKSSEDNRKTVEDIERRVRESSERNKDSVRRVLEEARKRNGEKLEELEKRLEDLLRRDKKLVDDLRKKLRDLEKRDRDLVEELRRELEELLKRVEDAAR

SEQ ID NO: 11717 - protein, 180 aa, Artificial Sequence; identical to SEQ ID NO: 11716
  Synthetic

SEQ ID NO: 11718 - protein, 180 aa, Artificial Sequence
  Synthetic
SELDRLLREVEKSSKRSEETLRDLRREVEDSSRRSEEILRRLLEESEKVAREVRKLIEDGQPKEEILKELARVIEESTRRAERSSRENEDTVRRIVKRVEDSSKRNAESVRDVMRKARERNGEKLEELEKRLRELLKRDKELVDELRKRLEELLKRDRELLKRLEEENRRLLEEVERRAR

SEQ ID NO: 11719 - protein, 180 aa, Artificial Sequence; identical to SEQ ID NO: 11718
  Synthetic

SEQ ID NO: 11720 - protein, 180 aa, Artificial Sequence
  Synthetic
KELDELLDEVRRSSETSERILRKLLREAEESTDRSKRTLKELLRELEEVVERVKKMIRDGKPKEKVLKELEDAVRRVLEDVRRSSEENKKSLEEIVRRVRRSSEENERTVRRVVEDARRRNGEKLKDLEKALRDLLDRDRKLVEELEDRLRKLAEEDEKVLRELEEELKRLLEEVAEETR

SEQ ID NO: 11721 - protein, 180 aa, Artificial Sequence; identical to SEQ ID NO: 11720
  Synthetic

SEQ ID NO: 11722 - protein, 188 aa, Artificial Sequence
  Synthetic
SLLEKLERDLERVHKESEDLARELRKELKRVHEESRELMKEIDKELRRVLEEVKSLLRRGDGEVLEELIRRAEEVLRTVERLLRRLIRISEEVLKKVEKDLERLERISREVVREVRRVLEEVKREREDVKDKVRRVEEKVEELLDRNRKLVEEVRREVEKVLRDDRRLVREVERKLKEALDEVRERVR

SEQ ID NO: 11723 - protein, 188 aa, Artificial Sequence; identical to SEQ ID NO: 11722
  Synthetic

SEQ ID NO: 11724 - protein, 180 aa, Artificial Sequence
  Synthetic
SEVEEVERRVDEVLKELKRKVDRSREESERIARELERLVEESEKKVRDVVRELEDLLRKVDREEVKKLVKEIIDELKRSSDRVRELVRRLIKEAEDSSDEVRRRIEDLLERLKELVEKAAREGRGEDLKEKIKEVEDRVDKVIKENKDLLDDVERRVRKVIKENEDLIKELRKRVEEVAR

SEQ ID NO: 11725 - protein, 180 aa, Artificial Sequence; identical to SEQ ID NO: 11724
  Synthetic

SEQ ID NO: 11726 - protein, 180 aa, Artificial Sequence
  Synthetic
SKVEELEKRVRKVMEKLKKLLKDSEKESDDVARRLEELLEESEREVREVLRELEDLLRKVDREEVKDAVRKLLERAKRSSDEVRKRIRDLIEESKRSSEEVKRLIDKLIKELEDVIRKAAKDGRGDDVDETIKRVEEEVKKVVDDNRRLNEEILRKVKKVIDDNRRLIEKVREDVDRMAK

SEQ ID NO: 11727 - protein, 180 aa, Artificial Sequence; identical to SEQ ID NO: 11726
  Synthetic

SEQ ID NO: 11728 - protein, 183 aa, Artificial Sequence
  Synthetic
SVVETVDKRLKRLLEKVEKSTEDSRRTAEESKKRVDRSTERVKEVLDRLRREVERLKDDDRADDIVREVVKRADELVKENEKVIKKVIEDNKKSVKENEEVIREVVKRIREVVEEAKRALKGGKKEKVRTVEKRAEDVIREARKLLEESKRRHDKVVEELERLLKKSKEDVDRVIKELEERRK

SEQ ID NO: 11729 - protein, 183 aa, Artificial Sequence; identical to SEQ ID NO: 11728
  Synthetic

SEQ ID NO: 11730 - protein, 183 aa, Artificial Sequence
  Synthetic
DEVEEVKKRLDELRKEVERSTREVREVLKKLLKEVKDSTDDVRRTIEKLLRDVERLKDEEEAKRIVDDVKRRIRELLDRNREVIKRVVEEARKVVDKNRRSVERVVDEARKLVEELIRRLKGGKKEELKKVEDRVREVIKDLEELLRDSKRTVEKVERELEDLVRKSEEEAERVERELEERAR

SEQ ID NO: 11731 - protein, 183 aa, Artificial Sequence; identical to SEQ ID NO: 11730
  Synthetic

SEQ ID NO: 11732 - protein, 183 aa, Artificial Sequence
  Synthetic
SVVEEVDRLLEELLRKVKKSTDESKETAKESRKEVKRSTEDNDRTVEKLRDEVRRLKDDERVEEVVEELIRRIERSAEENERVIREVIEKNERSMRENKRSVDDVVEKLRTVVDELRKALSKGVDDRVREVETRVKKVIDDVRRLVTESKKDHERVVKELRELVEESKRRNDRVVEEAKETAR

SEQ ID NO: 11733 - protein, 183 aa, Artificial Sequence; identical to SEQ ID NO: 11732
  Synthetic

SEQ ID NO: 11734 - protein, 183 aa, Artificial Sequence
  Synthetic
SMVEEVKKVLEKLKRDVDKSTDEVRDMLRRLLEEVRESSREVERRLRELKEEVDRFKDDERAKEIVKRVVEEAKKLVEENERSVRRVVEEIKKLLTRNKEVIDEVVKRARDLVRKLEEKLRGGKKEEVKKVKKEVDEVIRRLKELVRRSEEEARRVIKTLEKLLRDSKKRVEDVIKDLDRTVR

SEQ ID NO: 11735 - protein, 183 aa, Artificial Sequence; identical to SEQ ID NO: 11734
  Synthetic

SEQ ID NO: 11736 - protein, 183 aa, Artificial Sequence
  Synthetic
SMVEKVEEDLKKLTRDVEKSTEESRKTAEDSARDVRRSSREVEDVLRRLRKEVEELKDDDRAEEIVRRVVKEARDVVEENERSVRKVVERNRRSVEENKRVIDEVVERAKRLVERLREKLDKGKKEEVKKVEDKVKEVIERLKKLLDESKKRHEDVIRELEKLLEESERKVRKIIRELEETLR

SEQ ID NO: 11737 - protein, 183 aa, Artificial Sequence; identical to SEQ ID NO: 11736
  Synthetic

SEQ ID NO: 11738 - protein, 183 aa, Artificial Sequence
  Synthetic
SVVEEVKRRLEELEKRVEDSTRDSKRTLDESERELEESSRDNRRTVEELLDELRRLKDREEARDVARRVVEAIKKSLDDNRRSIDELVKKNEDSVKKNEKVIKEVVDEARKLVEKLVRRLKGGKKEEVEKVEREVREVIKKLRDLVRRSREEHEKVIEKLKRLLEESEDTNRKVIKKVEDDLR

SEQ ID NO: 11739 - protein, 183 aa, Artificial Sequence; identical to SEQ ID NO: 11738
  Synthetic

SEQ ID NO: 11740 - protein, 186 aa, Artificial Sequence
  Synthetic
SVTDEVREKLRRLLEELREVVKRVEDISRKTHEETKRVVEKVKRILEKLKREIEEVIRELGKDDRLRKVVERVEREARRVLKELEEAVKRSMKKNEKALRDLRRVAKKVVDALRKILKEVAERLKDRKEDLERLRRDVERVIREIEKLLRDVEEKVKETIKTDEDLLRRVKEDVERVLEEIDRRLK

SEQ ID NO: 11741 - protein, 186 aa, Artificial Sequence; identical to SEQ ID NO: 11740
  Synthetic

SEQ ID NO: 11742 - protein, 186 aa, Artificial Sequence
  Synthetic
SVAETVKERLKDLHRRTKESNERAKRISDELNKHNEKSVRDVDREVKRLLEEITEVIKRLGKDERLKKVAREIERILEKVLEDVKRNSEKAAREHKKVVEENHRSVRRSAEELKRILEEVARDLKDDKEALRKLDEEVKKVADDDRRLNEESRKRAKDSIEESRKLVRDVAERVKEVARKIREDLR

SEQ ID NO: 11743 - protein, 186 aa, Artificial Sequence; identical to SEQ ID NO: 11742
  Synthetic

SEQ ID NO: 11744 - protein, 179 aa, Artificial Sequence
  Synthetic
DEARELIERVKRVLDRVREENTRVNKELHDILRRVEKRNRDLLRELREILKDVKKKADEVREDKEVLRKLLKEVEKALRRVKEESDRSLKEVRDAVEEVKRISDTSLDKVRKVLEDAKRAVKDSRELEKELRRLIAEVARIVEESRRNLERIEEAIKRISETSEKEIREIEDRIKKDVD

SEQ ID NO: 11745 - protein, 179 aa, Artificial Sequence; identical to SEQ ID NO: 11744
  Synthetic

SEQ ID NO: 11746 - protein, 176 aa, Artificial Sequence
  Synthetic
SEAERAREEAKKLKEEIKKSNDELRKAAEKLKRDIERSNDELRKAIEELKRRVESLLRRVEKKLVDEVRRLAEDAARKLKRSLDETRKLVEKVLREIEESLKTVEELVKRLLEEIEKALESDEVLKEVKRIAEELHRHNREVLERIEKIARELEKHNRDVLDDIRRIVEKLERDLN

SEQ ID NO: 11747 - protein, 176 aa, Artificial Sequence; identical to SEQ ID NO: 11746
  Synthetic

SEQ ID NO: 11748 - protein, 176 aa, Artificial Sequence
  Synthetic
SEEERAREDLERLREEIRRSNEKLEEDSDKLRRDIEESNRRVEEEIRRLKEDVERKLKDVPEDLARKVRELVERLMDKIRKSLETTRELIRRVLEHDKRSLDEVEKIVREALKLIETRLESEEVLEEVRRLVKKLHEHNEESLRRSEEILKDLERHNRDVLREVEEIVREALERLD

SEQ ID NO: 11749 - protein, 176 aa, Artificial Sequence; identical to SEQ ID NO: 11748
  Synthetic

SEQ ID NO: 11750 - protein, 176 aa, Artificial Sequence
  Synthetic
REAEEAKKEADRLEEEVRDSNRKLEEDSKRLEREIRESNRKLKETAERLLRDVERLLKDVEERLVRDVKRKVEEAMEKLKKSLDKTRKLVRELLEHDRKSLEESERLVREVLRLIEEKLESKEVLEDIRRIVKELHDHNKKSMEDSRRIIEELKRHNKRVIDEVKKIVDELREKLR

SEQ ID NO: 11751 - protein, 176 aa, Artificial Sequence; identical to SEQ ID NO: 11750
  Synthetic

SEQ ID NO: 11752 - protein, 176 aa, Artificial Sequence
  Synthetic
REAEEAEKELKRLEDDIKKLVEDLDREAKRLKKEVDDSNRELEKESRRVKKEVRELLKDVDEKLVREVEKLVDEALEHDKKSLDDTRKLVEDVLRKLEEVLKEVKKLVDDALEEIRKKLESDRMLEKVKRIVDELRKLLKTVLDDVRRIVEELHRHNKESMERTRKILEDLARRLT

SEQ ID NO: 11753 - protein, 176 aa, Artificial Sequence; identical to SEQ ID NO: 11752
  Synthetic

SEQ ID NO: 11754 - protein, 176 aa, Artificial Sequence
  Synthetic
SEAERAREVLERLREEVERSNKRVREELKRLTEDVRRSNKKLREDSEEVRKRVEDLLKDVDKELVDEVRKLVKEALDLDEKSLKETEDLVREVLEEIEDSLRKTDELVKRALKIIEDKLESDEMLRRVRRIIEELHRLNKEALDRVRKIIEDLHRKNEDSLKKTEDILRRLEEELR

SEQ ID NO: 11755 - protein, 176 aa, Artificial Sequence; identical to SEQ ID NO: 11754
  Synthetic

SEQ ID NO: 11756 - protein, 179 aa, Artificial Sequence
  Synthetic
SSIEEVLERLRRLSDEVRKRTDDVLERAREISRETEERSRRINEEIERIVEELKKRADKDMVEKVKRDAEELLKKSEDLHRRVIETLRRLVERVREIHEETIRRLEELLKKVEDELKGGDKEAVDRARREVERLVKENEDILKRLEEEVRKLVKRNEDLVEENRREVEKWRKELEDRKR

SEQ ID NO: 11757 - protein, 179 aa, Artificial Sequence; identical to SEQ ID NO: 11756
  Synthetic

SEQ ID NO: 11758 - protein, 179 aa, Artificial Sequence
  Synthetic
SEIDEVLKKLRDDSKKVEEDTRRVLEELERISEKTRKDSEEVLREIEDIVEKLKRRSDEDMVRRVMEEADKLLKELEDRHRDAIRRLEELVKRVEEIHREVIERLERLLKEVEKRLSKGVREEVERAEEEVRKLVEENKRIVKEAKERVDELVERNKEIVEEIRREVERLKKELEDRRR

SEQ ID NO: 11759 - protein, 179 aa, Artificial Sequence; identical to SEQ ID NO: 11758
  Synthetic

SEQ ID NO: 11760 - protein, 179 aa, Artificial Sequence
  Synthetic
REVEEVTKELRKISKEVEDLTREVLREAREISRRTEEESRRLNKEIAEIVERLRREGDEKAVEEVLREVDKLLEESERLHREAIERLRRLLEEVEEIHRRVIEEMKRLLDDLTRKVDKGSKEDVRRVAEEVKRLVDKNRRIVEEAKKEVDRLVKRNEDLMRRNREEVERWKRELEEDRR

SEQ ID NO: 11761 - protein, 179 aa, Artificial Sequence; identical to SEQ ID NO: 11760
  Synthetic

SEQ ID NO: 11762 - protein, 179 aa, Artificial Sequence
  Synthetic
SEVDEVLKTLKKLSDDARKKTKEVLDRLRDISRRVEEESRKVLEEIRRKVEEVKKRRDDDAVKEVMKDADRLLKRLEEIHRKVMDELDKLLKRVEEIHRETIEELKRLLKDVTDKVSKGSKDKVRKVKEDVRRLVEDNKRIVKEAREEVERLKERNKDIVRRIKETVDRLKDELRKRAE

SEQ ID NO: 11763 - protein, 179 aa, Artificial Sequence; identical to SEQ ID NO: 11762
  Synthetic

SEQ ID NO: 11764 - protein, 179 aa, Artificial Sequence
  Synthetic
SDVDRVLKELEDISKDVEDKTREVLKRLKEISDEVKKRSEDINREIARIVEDLERRRDERFVERVKREADRLLKESRDIHRRVMRELEKLLEDVERIHREAIKTLEDLLRKVEKKVSKGDKEKVKDARRVVRELVERNKEIVRRAAEVVKKLKKENAKLVEDNTREVKKWKERLERRRR

SEQ ID NO: 11765 - protein, 179 aa, Artificial Sequence; identical to SEQ ID NO: 11764
  Synthetic

SEQ ID NO: 11766 - protein, 177 aa, Artificial Sequence
  Synthetic
SEVEDLLRKLKEISDESRERIKRLLEELEEISRKSKEDSERSNEELHRIVKRLKEENRDEAVERVKDALRRVLERDRELVERSIRVLKKVVDDVRRIVEESVKRLRDVVRKVRRDVEREEDLRRAEDDVRRLIEDNKRLLEEAKRRVDDLRRKNEEILRESEKNVRRIEKELEDRRR

SEQ ID NO: 11767 - protein, 177 aa, Artificial Sequence; identical to SEQ ID NO: 11766
  Synthetic

SEQ ID NO: 11768 - protein, 177 aa, Artificial Sequence
  Synthetic
SEVEDLLRKAEEISDRSRREIEKLLRELERIVREVRERSKRSNDELHRIVKELKEERRDEAVERVKRVLEEVVKRDEEIVRDVARLLERVVKEVERIVRESVEMLKRIVETIRRDLEDEKKLRDVEKRARELIRDNERLLEDAKRRVDELRRELKKILDDSRRNVERIMKELDDEKR

SEQ ID NO: 11769 - protein, 177 aa, Artificial Sequence; identical to SEQ ID NO: 11768
  Synthetic

SEQ ID NO: 11770 - protein, 177 aa, Artificial Sequence
  Synthetic
SEVDELLKRLEEISEESRRRSEDSNREVHEIVKEVKKRSEDSNRRLHKIVEDLKRENKDKAVEEVKEVLREVVERDEEIIRRVRERIRDLVRRDERIVRESVKRLRKVVEDVRRDVEDKDELKRAEDRVRELIKENKRILDESKENAERIDRELKKILEDSKRNVEEIAKRLEEDRK

SEQ ID NO: 11771 - protein, 177 aa, Artificial Sequence; identical to SEQ ID NO: 11770
  Synthetic

SEQ ID NO: 11772 - protein, 177 aa, Artificial Sequence
  Synthetic
KDVEKLLRELEKISEDSKRESDKSNKEVHDSSREVERRSRESNRRLHKVVEDLKRTNRDEAVERVKELLKKVVEEDKRIAEEDEERIERVLRRDKEIVRKSVEDLRRVVDKVRTRVERDEDLRRAKREVERLIRENEKILEDSRENLRRIAERSRRVLEESERNVRRLIEELEETRR

SEQ ID NO: 11773 - protein, 177 aa, Artificial Sequence; identical to SEQ ID NO: 11772
  Synthetic

SEQ ID NO: 11774 - protein, 177 aa, Artificial Sequence
  Synthetic
REVEELLKDLRRILEEVKRRIEKLLDELRKISEESRRRSEKSNEELHDIVKKLKDENKDEAVERVEEVLKKVLERDKRLVDRSVEELRRVVEEIKRIIDRVVERLEKVVEDVRRDVKDEKTLRDAEREVKKLIDTLRKILEDARREVKKLIDKNEKILRDSEKNVRDIAEELRRTRK

SEQ ID NO: 11775 - protein, 177 aa, Artificial Sequence; identical to SEQ ID NO: 11774
  Synthetic

SEQ ID NO: 11776 - protein, 177 aa, Artificial Sequence
  Synthetic
DEVRELLREVKEAVDEVRRRSEESNREAHRVSEESEKRSRESNKRLHEIVEDLKRRNKDEAVEEVKKALRRVVEEDKRLVDESVERLEELVRRDEEIARRLEEKAKKVVEKVRRDLEDEEKLKRAEEEIRKVIEDLRRILRESRENAKRIIRRNREILRESKKNVEDLERELEETRR

SEQ ID NO: 11777 - protein, 177 aa, Artificial Sequence; identical to SEQ ID NO: 11776
  Synthetic

SEQ ID NO: 11778 - protein, 177 aa, Artificial Sequence
  Synthetic
SEVEELLKRLRESSRRVRELSKRSNEEVHRSSDKVRRDSEESNRELHKIVEDLKRENRDDAVRRVKKRLDDVVEKDRKIVEDDVKLARDVVERDRRIAEEDVRELERVVKEVERDLEDERKLREARKEVKKLIEESREVLERSERNIRELIKESRRLLEESRRNVERLKKELEDTRK

SEQ ID NO: 11779 - protein, 177 aa, Artificial Sequence; identical to SEQ ID NO: 11778
  Synthetic

SEQ ID NO: 11780 - protein, 180 aa, Artificial Sequence
  Synthetic
SEEDEARKDVKELEDRLRKINEDSERAVRRIEEELKRILEENDREVKRLLRKIEELLRRKSSEEIKKLVDDLKKIAEDVLREAKKSVDDLRRILRKVLRDSSELVKELKEILERALRVVEAGVDIETVIRELRKALEEAARRSKRLIDELKKVLEEVKRANEETNKRLTEVVEEVAERIR

SEQ ID NO: 11781 - protein, 180 aa, Artificial Sequence; identical to SEQ ID NO: 11780
  Synthetic

SEQ ID NO: 11782 - protein, 180 aa, Artificial Sequence
  Synthetic
KEKEDAEREVERLERESRRVNRESEEEIKRLLRESEKVNEDSEREVRRIREELERLLRKKEDDEARRMVEELEKILKEVLERSSELVERDREILERILRESSRLVDEDRRILEEALRVVREGVDIDKVLTELRRSSEEVTRLSEELIERVARSSRKVKELSRKLIEELRKVLKDVARRLE

SEQ ID NO: 11783 - protein, 180 aa, Artificial Sequence; identical to SEQ ID NO: 11782
  Synthetic

SEQ ID NO: 11784 - protein, 184 aa, Artificial Sequence
  Synthetic
EELERLEKDLREVIKDSERSSDDVRRRLEEVIRDNERLLEELDERLKEVIRDVEDLLRKKDREDVKRLLKELRERVDKVRKDAEDLLRRSRKIVTEWIRRSERAVEENRRVVDEVRKEAAKEDKNKKLIDDLRRKIEESLKDSRRLDEEARKEIERISRKTREDIKELLDRIKEVLDEIRERIR

SEQ ID NO: 11785 - protein, 184 aa, Artificial Sequence; identical to SEQ ID NO: 11784
  Synthetic

SEQ ID NO: 11786 - protein, 184 aa, Artificial Sequence
  Synthetic
DELEDLERKLKEIIDDSKRLLDELEKRLRESNREVERLLDELRKELEKVIRDVEELLKKKPREEVAKLLEDLRRKVKEVEEELRRMLKKNRDVTREVKKEADKALKENERLADEVRKEATREDKNKELIDKLVRELEKSLEESRRLIEELRKEIERTSREIEKRIRDLLKEIKDVLDDIRRRIE

SEQ ID NO: 11787 - protein, 184 aa, Artificial Sequence; identical to SEQ ID NO: 11786
  Synthetic

SEQ ID NO: 11788 - protein, 183 aa, Artificial Sequence
  Synthetic
SELEEVEKRAEELARTLEELNRDVNRRLEELLRRLEKINRTVNDELRKLLEELKDVRRRGKKDVEETLKRVEDRAEELVREVKERTKEVVRRAAELVRKVVEDSRRVAEEIRELAREVAERVESKEDLDRLDKRVRDIVRDLERINEETRKTLEEIRERLERILKRTEENLKEIKEEVRKDEK

SEQ ID NO: 11789 - protein, 183 aa, Artificial Sequence; identical to SEQ ID NO: 11788
  Synthetic

SEQ ID NO: 11790 - protein, 183 aa, Artificial Sequence
  Synthetic
SELEKVTEDVRRLLERLRDINRRVNEALRRLAEELKRLNDEVNKLLRELVTELKKASKDGVPNVEEAVDRVLEELERLVKTVKDISREVAKRLEDLVRRVVEETDKVLRKIRDDVDKVLKRVEDKDKLEELKREVERIEKDVREILKRTEDNLRRIVEELKEINERTEDSLRKIVRELSEDRK

SEQ ID NO: 11791 - protein, 183 aa, Artificial Sequence; identical to SEQ ID NO: 11790
  Synthetic

SEQ ID NO: 11792 - protein, 183 aa, Artificial Sequence
  Synthetic
REKDELRKKVEELLKRLEEISKRTKDSVERVLRELDKITKESKKRAKKLVDRLKELLKRVTDERVKEIVRDVLRKIDKLVRDVARLNEEVKKRIKDLVREVEKRNRDVLDEIRKLVEEVERRGDERAIEEVLKTIEELIKEVEDVNRRVNETIRELLERLRRANEDVIRKVEKLIKEVEDATR

SEQ ID NO: 11793 - protein, 183 aa, Artificial Sequence; identical to SEQ ID NO: 11792
  Synthetic

SEQ ID NO: 11794 - protein, 183 aa, Artificial Sequence
  Synthetic
SEKERLRDMLRKIRETLDRISEDTKRSLDEVRRRLEEISKRTKDNARKLVRELEELLRRVSRKEVKKIVDDVRRRIEELVKEVEETNKRVLEEAKKLVEEVVKLNKTVLKEATRLIEEVERRMDEEFVKRVEDTLRELLDRVRRENERVNRDIDRLLKEVEERNKRVNDELRKLIEDVKEAAR

SEQ ID NO: 11795 - protein, 183 aa, Artificial Sequence; identical to SEQ ID NO: 11794
  Synthetic

SEQ ID NO: 11796 - protein, 186 aa, Artificial Sequence
  Synthetic
DDVRELIERLERILKRVEDINRDVNRKLRRVLERVRKDNEDSNRKTEKVLRDVKERADEIRSDEDALKKLVEEVERVLEEDIRRSEESVDEVRRVLEEVIRRSEETVKEVEEVIKEVEDAVRRASISEKLLRDVERELKRVREDLERILRESRDVVRRVKEELDKILEESRRKVEKVRKDLEDTRK

SEQ ID NO: 11797 - protein, 186 aa, Artificial Sequence; identical to SEQ ID NO: 11796
  Synthetic

SEQ ID NO: 11798 - protein, 186 aa, Artificial Sequence
  Synthetic
SEVEKLITDLRRILKEVEERNRELNKRNDETLKRVEETNRRVNKELKEILDRVIDEARRKREDRDLLRKLVREVEEVLKKVLRDSEETAKEVERSTREVETISRKTVDEVRKVIERVKEAVERLEISEDLLRRVEEELRKVEKDLKRILDKSRDDLRKSRERLERILRRSEEIVREVEERLRRAAT

SEQ ID NO: 11799 - protein, 186 aa, Artificial Sequence; identical to SEQ ID NO: 11798
  Synthetic

SEQ ID NO: 11800 - protein, 186 aa, Artificial Sequence
  Synthetic
DEVRKIIKELEEILEEVRKRNEKLIRENEETLERVRKINEKAIRELEDILRRVKEAVERKREDERLLRELVKTVKKVLEDVEKKSEDTLDEVRRSTERVIRESERSVEEVRRVVKKVLEMVRRLEVSEDVLRDAERRVREVREKLERINKTSRDRLKRSKEEADRINKESREVVKRVKEELEKTAT

SEQ ID NO: 11801 - protein, 186 aa, Artificial Sequence; identical to SEQ ID NO: 11800
  Synthetic

SEQ ID NO: 11802 - protein, 186 aa, Artificial Sequence
  Synthetic
DEVERVIRELERILREVEKRNRDVLRKNEETLREVRERNERAIEELRRILKKVKEEAERKREDEDALRRLVKRVEEAIKRVRELSERSVRKVEESTKEVEDDSRRSVETVRRMLEKLRREVEKLEVSEDVLRTVRKKVEEVREALDRINETVKKALDDSRRRLEKINRDVRRDVEKVREDLERTAT

SEQ ID NO: 11803 - protein, 186 aa, Artificial Sequence; identical to SEQ ID NO: 11802
  Synthetic

SEQ ID NO: 11804 - protein, 186 aa, Artificial Sequence
  Synthetic
DEVKKLIDDLRKILDRVRKENRRVIEELRKILEDVERRNREAIERLERILRRVVDLMRKKREDRKMLEDLVREVERAIERVEKLSEESLDEVRRVIEEVKRRSDKTVKDVRDALKEVLEAVERLQVSEEVLKRVREEVDRVRRELDRINEDSERVLRDVARELERINREVRKRLKEVEKRLREAAK

SEQ ID NO: 11805 - protein, 186 aa, Artificial Sequence; identical to SEQ ID NO: 11804
  Synthetic

SEQ ID NO: 11806 - protein, 186 aa, Artificial Sequence
  Synthetic
SEVEKIIKELREILERVREDNRKIIDDLRKILKEAEDTNRKVIKELKEILKDVSKLMKEKRSDEDALRRLLEEVDRVIKDVIRLSNESLKEVERVIEEVERRSRKSVEEVRRVIKRVLEMVKRLEVSEELLKEAEKDVRRVKEKLDKINRDVREELKKVAEDVKRINDRSREELRRVKEELKKDSD

SEQ ID NO: 11807 - protein, 186 aa, Artificial Sequence; identical to SEQ ID NO: 11806
  Synthetic

SEQ ID NO: 11808 - protein, 186 aa, Artificial Sequence
  Synthetic
KEVEKVIEELRKILDDARRENERLLRELEEILKRVEERNRKLLEDLRRILEEVRKKAKDIRRDKDALDKLVREVDKVIKRVKEESDRSVEEVRRVIEEVITRSEKSLRDVERAIERVKETVDRLQVSEEVVKRVEEELKKVKEDVERINKEVRDRLREVEERLEKINEDTERTLKKVKDELEETKR

SEQ ID NO: 11809 - protein, 186 aa, Artificial Sequence; identical to SEQ ID NO: 11808
  Synthetic

SEQ ID NO: 11810 - protein, 179 aa, Artificial Sequence
  Synthetic
DELRDVLRRLREVLTELEKENRKSIEELKKLNEDVARDIKRVIDELRKLLKRVKEEIEKNKDSKELIERLLEEVEKAVKRIDELVKKLLDDNKRVVDESRELARRTLETVEEVVRKILETADKDEEVRKELEDVRRKAEKILRDNDERLKESNRHMEKLLREVKEELKRVRDAVEEARK

SEQ ID NO: 11811 - protein, 179 aa, Artificial Sequence; identical to SEQ ID NO: 11810
  Synthetic

SEQ ID NO: 11812 - protein, 179 aa, Artificial Sequence
  Synthetic
DEVRDVIKKLKDLNDRLDDENKKSIEDLKRELERLERRNRDSIRRLEELLKDVADKIRRRRDDEELVERLLREVKKVVEDSRRLAEETLKEVKDIVKRSEELARTTLERNRDVVKKIIEAADKDKDVRKRLRESNEHMKELLKENKELLKRLEDEVKRILERNKKELDRVLRRAEELRK

SEQ ID NO: 11813 - protein, 179 aa, Artificial Sequence; identical to SEQ ID NO: 11812
  Synthetic

SEQ ID NO: 11814 - protein, 182 aa, Artificial Sequence
  Synthetic
RSVEEVRKVLEELKREHEKISKKTEEVLEDLKRRHEEIIKRVRDVLREIEEDLRRIRSRVDDELKRVLSEVLERVRRLVKELEDILKDSLRKIEKLVRELHEINKRSLDTLRELADRLAKDDTDEKVEKVIRELRRSVEDSKRRNDEAIRRLEESVRKSSDEVRRAIKELRDLLKKVRDTTK

SEQ ID NO: 11815 - protein, 182 aa, Artificial Sequence; identical to SEQ ID NO: 11814
  Synthetic

SEQ ID NO: 11816 - protein, 182 aa, Artificial Sequence
  Synthetic
STVERVREEADRLRKEHERISDETRKVLRKLEEDHERISRRTEELIERIEREVRKIESRVDEDLVRELREVLKEVRRLAKEVHEENKRSLDRLRELVERLHRENDKSLREIDKLADELAKDDDDEKVKRVEEEVRRSVEESKKENKKVIDDARRSVKRSEDRNREVIKEVKRLLDTVRERAK

SEQ ID NO: 11817 - protein, 182 aa, Artificial Sequence; identical to SEQ ID NO: 11816
  Synthetic

SEQ ID NO: 11818 - protein, 182 aa, Artificial Sequence
  Synthetic
STVEDVRRRADELRRRHKKISEETERVLRRIEEAVRRILEDLRRILKEIEDRVRELLSRVDEKLKRVLEEVRRRLKKLVEELERRLTEVLKRVRELIRKLHEDNKRSLERIDKLADELAKDDDDEKVKEAKRRVTESVRKSKDRNRRVIEEVDRLLKRVEEEVRRVKEEAKELLREVAERTK

SEQ ID NO: 11819 - protein, 182 aa, Artificial Sequence; identical to SEQ ID NO: 11818
  Synthetic

SEQ ID NO: 11820 - protein, 177 aa, Artificial Sequence
  Synthetic
SSVEKVIEDLRRISEKVKKRTEDVLREAEKILRRVEKDNKKVNDDARRIVEELERRGDEKAAREVVKKVEDLLKELKEIDEEVARRVRKLVKELKEIHRKVIEDVRRLVKELEDEGIEKRLVDRVREAAKDIEDENREVLRRVEEILRRIEEELKRSSDETEKAVREIKRRLDERAR

SEQ ID NO: 11821 - protein, 177 aa, Artificial Sequence; identical to SEQ ID NO: 11820
  Synthetic

SEQ ID NO: 11822 - protein, 177 aa, Artificial Sequence
  Synthetic
EEVERVLEEIKRISTDVARRSKEVLKRARESSERVKRRTEEVLEEIRKTNEDVARRADEELFKKVVEDNKRLLDRLREEHRKDDEVVRKLLKELEDIHRKSIEEVRRLLEDLERRGIDKKVVDRLRKEVKRNEDENREMVREVEEEVRRLEKENEEAVRRAADIVRRSEEHLRERTR

SEQ ID NO: 11823 - protein, 177 aa, Artificial Sequence; identical to SEQ ID NO: 11822
  Synthetic

SEQ ID NO: 11824 - protein, 184 aa, Artificial Sequence
  Synthetic
KEVEDLLREVEKSSEKVRELIERSIRELERILEKVAEEIRRSIEELEKILERVAEVAKRRDRELVKRIIEEVLERVDRVNKENEEIIRKVAKEVDDVNDRNRKIVTENKKELERVLREIRNLPVDEKIVKRVEDEIRRLMKKSDELLERSTKVVEDIKRELEKLLETSSRMAEDIKRKLEELRR

SEQ ID NO: 11825 - protein, 184 aa, Artificial Sequence; identical to SEQ ID NO: 11824
  Synthetic

SEQ ID NO: 11826 - protein, 184 aa, Artificial Sequence
  Synthetic
SEVEKLIEELERILEEVARRLKKSNEDLRKILKEVAKRIKDSIRDLRRILEEVADELRRRSEELVERIIRDVLRRVDKVNKENDEIIKRVEETVRRVLDRNRKIIKEVEDTVDKVLKEIRDLPVDERIVEEVERAAEEIKRRLEELVRRSEKSVEEIERELRKLLKDSSDVVREIKKRLEDERR

SEQ ID NO: 11827 - protein, 184 aa, Artificial Sequence; identical to SEQ ID NO: 11826
  Synthetic

SEQ ID NO: 11828 - protein, 184 aa, Artificial Sequence
  Synthetic
SEVEKLLKEVEDSSRKVEEDLRDSNRELKKILDEVADRIRKSIKRLEDILKKVAEDAKRRDKELVEKIIKEVLDDVERVNRENKRILEEVRKRVDEVLRRNREIVKENEKLLDDVLKEIRDLPVDEKIVRDVERRVRELKERSRRIVEESERSAREIKRELKRLEDDSSRVVEDIRKKLEELAK

SEQ ID NO: 11829 - protein, 184 aa, Artificial Sequence; identical to SEQ ID NO: 11828
  Synthetic

SEQ ID NO: 11830 - protein, 184 aa, Artificial Sequence
  Synthetic
REVEELIKRVEESSRDVERRLRESNEEVERSTRRVAEEIKKSIDRVREIVERVERKKERVSEDILRDIARRVSEFVRRANKRNEKIARDNRRRVREVLRRNREIVKRNKELLDKVLEEIERLPVDEKIVERVRRVIEELKRRSDEIVKESERSVRRVEKETTELLEESSRAVERVERRLRELVR

SEQ ID NO: 11831 - protein, 184 aa, Artificial Sequence; identical to SEQ ID NO: 11830
  Synthetic

SEQ ID NO: 11832 - protein, 184 aa, Artificial Sequence
  Synthetic
SEVEKLIEEVRRSSKKVEEDLDRSNRELEDILRRVAEELEKSNRELEKILKEVAERVKRREERLVKKIVEEVERKVDEVLKRNRDIIRKVEETVERVLRRNRKIVDDNRKLLDKVLEDIRRLPVEEEIVKRVEEEARRLKERSREIVKRSEDSAREITKALRKLVRDSEDSVRKIKEKLKEETR

SEQ ID NO: 11833 - protein, 184 aa, Artificial Sequence; identical to SEQ ID NO: 11832
  Synthetic

SEQ ID NO: 11834 - protein, 184 aa, Artificial Sequence
  Synthetic
REVEELDKRLKESSTEVEERLRRSNREVEDSTRRVEEEARKSNEELREILERVAEDVKRRRKEEVDKIVRDVDERVKEVLKRNEDIARENERLLDRVLKRNKEIVEENEKLLRKVLEDIRRLPVEERIVERVERSARELMRRSRDIVRRSKESIERLKKRTRDLVKESRESVEKIKRDLEELRR

SEQ ID NO: 11835 - protein, 184 aa, Artificial Sequence; identical to SEQ ID NO: 11834
  Synthetic

SEQ ID NO: 11836 - protein, 184 aa, Artificial Sequence
  Synthetic
SEVEKLLKELEDSSKKVEDDLRKSNEELRKIVEEVADLIRRLNKELEEILREVRERMRRVSEEEAERILREVAERVKRVHDESREIIERVLRDVERVLEENERIIKENKERLDKVLKEIRDLPVDEEIVRRVEKIVRDLKRRSDELVRRSRKSVEEIRKELEELVERDRRSVERIKEELDKERK

SEQ ID NO: 11837 - protein, 184 aa, Artificial Sequence; identical to SEQ ID NO: 11836
  Synthetic

SEQ ID NO: 11838 - protein, 184 aa, Artificial Sequence
  Synthetic
SEVEKLTKEVRDSSKRVEDELRKSNERLKESTDRVADEIRRLNKELKEILDKVAREVERRDKKLAEDIIRDVKKKVDEVHKESRDIAEENKKLIDEVLRRNREIIRENMERVERVLKEIRDLPVDEEIVERVERDARKVKEDSKRLVEESEESVRRLKTDTERLVEEDKKSVDTIKEELKKLTK

SEQ ID NO: 11839 - protein, 184 aa, Artificial Sequence; identical to SEQ ID NO: 11838
  Synthetic

SEQ ID NO: 11840 - protein, 184 aa, Artificial Sequence
  Synthetic
DEVEELRKELEDSSREVEELIRRLNKEVEKSTREVAKRVKDSNKRLDEILKKVAEEVKKRSKETAKRIIEEVMRRVREALRRNEEIAERNRRLLERVHDTSRKIVETNKDRLDRVLERIRNLPVDREIVERVREEVEKLKKRSEDLLERDKESIDKLDKETKELVEESRKSVRDIERELKKLSD

SEQ ID NO: 11841 - protein, 184 aa, Artificial Sequence; identical to SEQ ID NO: 11840
  Synthetic

SEQ ID NO: 11842 - protein, 184 aa, Artificial Sequence
  Synthetic
DEVEKLIKDVEDSSREVEERIRDLNRKAKKIVREVAERIRELNERLKEILDKVAEEVKRRDKELAKEIIKKVLEDVRRVHKESRDIIREVKEVLDRLHKTSEDILRKNKELLDKVLEDIRRLPVDEEIVKRAEKRIRELKKKSDELLKRDRDSMDRIKKELEKLTREDEESVRRIERELKRLAD

SEQ ID NO: 11843 - protein, 184 aa, Artificial Sequence; identical to SEQ ID NO: 11842
  Synthetic

SEQ ID NO: 11844 - protein, 184 aa, Artificial Sequence
  Synthetic
SEVEKLIEEVRRSSEEVERRIKKLNDDVRRSTEKVEEDIRRLNEELKKILDEVAKEMERRDKEEVKRIIEEVEKRVKEVHDRSREIAERNKKRIDDVHRESARIAEENKEELDKVLKRVRELPVDERIVRRVEKIIRDLKKRSDELLKEDRRSAEEAKRETDRLVEEDKRSVDEIRERLKELSR

SEQ ID NO: 11845 - protein, 184 aa, Artificial Sequence; identical to SEQ ID NO: 11844
  Synthetic

SEQ ID NO: 11846 - protein, 184 aa, Artificial Sequence
  Synthetic
DEVEELLRRVEEIVERVAKRIEELNRRLEEILEEVARRSTKSIKELEDILRKVAKEMERRRKEEAKKILDKVVKDVEEVNKRDEEIARRVEKIVKDVHRDSRRIAEEVLRFLDRVLERIRELPVEEEIVERVERRIRELKKRLEKLVRDDEESVKEIRKKLEELVKRSSDVVERIKRELDKLRK

SEQ ID NO: 11847 - protein, 184 aa, Artificial Sequence; identical to SEQ ID NO: 11846
  Synthetic

SEQ ID NO: 11848 - protein, 184 aa, Artificial Sequence
  Synthetic
SEVEKLLRELRESSREVEERIRKLNRELEKIVRDVDRESARSIEELKRIAEEVAERAKRRDKEDVKRILERAVEEVRRVNKRDRDIIREVLKLVDDVHEESRKIVEDNKRTLEKVLEEIRRLPVEERIVKEVEEEVRRLKKRSTKLLEDDRKSVEDIKERLKELVRRSSEVVKEIEERLKRLEK

SEQ ID NO: 11849 - protein, 184 aa, Artificial Sequence; identical to SEQ ID NO: 11848
  Synthetic

SEQ ID NO: 11850 - protein, 184 aa, Artificial Sequence
  Synthetic
SEVEDLLRRVRESSKEVEERIRKLNDELRKSTKEVEDRSRRSIERLDRIVEKVAREVERRDKELVSRIIKRVLEDVDRVNKEDKEIAEENKKEIDRVHEESRRIVEENKKLVDEALERIRRLPVDEKIVRDVEREVRRVKERSDRLLEEDRKSVEELKTRTDRLLEESSKRAEDIKRKLKELEK

SEQ ID NO: 11851 - protein, 184 aa, Artificial Sequence; identical to SEQ ID NO: 11850
  Synthetic

SEQ ID NO: 11852 - protein, 184 aa, Artificial Sequence
  Synthetic
SEVEKLLREAKESSREVKDRSKKSIDELRESTKTVERLIRDLNRKLKEILDRVADDMRRRDKELAERIIREVLKRVDDVHRESKKIADENKELLKRVNDRDREIVKRNDELLDEVLKRIRELPVDEKIVRRVEEIVRRLKKESKDLVEESTRVADELRRRTDRLVEEDERSVRKIKEDLDRLRK

SEQ ID NO: 11853 - protein, 184 aa, Artificial Sequence; identical to SEQ ID NO: 11852
  Synthetic

SEQ ID NO: 11854 - protein, 181 aa, Artificial Sequence
  Synthetic
SEKEEAKRRARELEKRTDELLEESTRVNEESKRHLKELLDESRRTAKRVKEEIDKLLKEKREGDRVEELVKELKKIIDEVLKRNEELIREAERIDDESNKRNEELARRDKEIIRELLRLVEEGVDVDTLLERVDRSSKEVADRMRKSNEEVKDVNRRVAKALKDSNRDVERVLEDVARKIK

SEQ ID NO: 11855 - protein, 181 aa, Artificial Sequence; identical to SEQ ID NO: 11854
  Synthetic

SEQ ID NO: 11856 - protein, 181 aa, Artificial Sequence
  Synthetic
SEKETARKVIEELRKETERLLRESTKTNEDSSRHAKELLKRSEDVAREIEERIDRLLEEKKDGDEVKRLVEELKKRVEELLRRNEELVRRLEEIDKRSNDENRKLAEEDKRRLEDAERRVEEGVPIEEVIKRLEDSSRDVERRLRKSNEDVKRVNKEVADRLKESNDRLREELKKVEDDIR

SEQ ID NO: 11857 - protein, 181 aa, Artificial Sequence; identical to SEQ ID NO: 11856
  Synthetic

SEQ ID NO: 11858 - protein, 181 aa, Artificial Sequence
  Synthetic
DEKEDAERKIRRLEERTKKLLDDSTKTNKESRDHLRKLLADSEKTARDIKRAIKKLLDDKKDGDEVRRLVEELKKIIDKVLEDNKRLIEEVEKIDKDSNDENRKLVDDDRRKLEEVRKLVEEGVDVDTLLTEVTDSSRRVEEELKRSNDEVRRVNREVAERLKKSNRELEEVLRKVAEDIK

SEQ ID NO: 11859 - protein, 181 aa, Artificial Sequence; identical to SEQ ID NO: 11858
  Synthetic

SEQ ID NO: 11860 - protein, 181 aa, Artificial Sequence
  Synthetic
SERERAEEEAKKAKKEAKRLLDESTKANEDSKRHADKLLEDSKRAAEDIKRKAEDLLRKKKDGDRARRLAEEARKIADKAVEDSERLAREAAKIDKDSNDESRRLAREAEEIADRALEAVDRGADARRAIEEVRRALKEAADASRDLNRRAKEANERAAKASEELNKRAEDALRRASEEIR

SEQ ID NO: 11861 - protein, 181 aa, Artificial Sequence; identical to SEQ ID NO: 11860
  Synthetic

SEQ ID NO: 11862 - protein, 181 aa, Artificial Sequence
  Synthetic
SEKEEVKKRVDEIKERLKRLLDDSTRTNEESRKHIEDLLEESKKEIDKVRKDLERLLRKKEEGDRVRELIKEIERILEKAVRDSKELVDRLRKIDEDSNRESKRLIEEVEEILDRALELVKAGVDVDTMTRKVEEVLRDVAEKIKELNRRVEEANKDMARESERLNREVRDVLRKVAKDIE

SEQ ID NO: 11863 - protein, 181 aa, Artificial Sequence; identical to SEQ ID NO: 11862
  Synthetic

SEQ ID NO: 11864 - protein, 181 aa, Artificial Sequence
  Synthetic
SDEDRAREDLKRIKEELKRLLRESTEVNKESEKHIRKLLRESEETIRRLKKAIDDLLRKKREGDEVERLVREAKTRLDEVLKRSKELVDTLREIDKKSNKDSRKLVRDAEEILDRALRLVEAGFDIETILRRLERVLKEVEKKSRELNRRVKEVNEKVRRDIERLNKEVKDVLKTVAERIT

SEQ ID NO: 11865 - protein, 181 aa, Artificial Sequence; identical to SEQ ID NO: 11864
  Synthetic

SEQ ID NO: 11866 - protein, 181 aa, Artificial Sequence
  Synthetic
DEKERAEERIRELKKRTEELLRESTRVNRESKEHAKELLKRSEDTIRELDERIRRLLERKKDGDRVRELVKEAKKRLKEVLEESEDLVRKLEEIDDESNRRSERLVREDERILREARKLVEDGVDVDTVLARLEESSKEVEDRSKRLNEEVKKVNEEVAKRIKELNEEVERVLRRVAEEIE

SEQ ID NO: 11867 - protein, 181 aa, Artificial Sequence; identical to SEQ ID NO: 11866
  Synthetic

SEQ ID NO: 11868 - protein, 182 aa, Artificial Sequence
  Synthetic
SLKEELREKVRKVKEDSERLLRDLERTVKKVREDSKRILDRNRETAKEIERRIRELERNGKISDEAVRRIEEVLKRVIELSERLLRRNEEVLKEVIKKVERMLRENERLLREVEREVDREKDNEELVRKLRKELDDSLKRTKELVDRLKEDLERSLRDSEELARRLDRELEDVLRRIEDEAR

SEQ ID NO: 11869 - protein, 182 aa, Artificial Sequence; identical to SEQ ID NO: 11868
  Synthetic

SEQ ID NO: 11870 - protein, 182 aa, Artificial Sequence
  Synthetic
SLLETLKEIVRRVERESARILEDNRRTVTRAKEESKKILDRNAKTVDDLRKEVERLKTEGKISEELAKEIERVLRDVLRLSKEALERNEKVLREVIETSERALRENRKLLKRVIEEVAREQDNEELVRRLVEELEKSLRTTERLARELDRKIKESLDTSEELARRLDKRLEEVLKDVKRRAE

SEQ ID NO: 11871 - protein, 182 aa, Artificial Sequence; identical to SEQ ID NO: 11870
  Synthetic

SEQ ID NO: 11872 - protein, 182 aa, Artificial Sequence
  Synthetic
RLEEELKKTVDRAREEVKRLLDRDRESVDDLRRAVEEILKTNRRTVEKLRKDLTDLRRNGKIDDELVKRIEEVLKRVERASREALRRIKEVLEEVERKSKKALDDIEKVLREVEDVVRKERDNEKLVRELIEKIKKVLDEVRRLSEKLNEDLREILERVKRLADKLDEELKRMLEKVEETAR

SEQ ID NO: 11873 - protein, 182 aa, Artificial Sequence; identical to SEQ ID NO: 11872
  Synthetic

SEQ ID NO: 11874 - protein, 187 aa, Artificial Sequence
  Synthetic
DDVERVKRDIDRLLEKVTRENEKVKEKMKELLDRAREVNRKVKEDIKRLLKEVEDVARREGGESERVVRRARKVVKDVEDLVREVHKLNEDIVRRAEELVRRLHRLNEEIVREIARLVEEVVRRRGEDTEDVRDLERRLREVEEEARKLSEDVRRVLEEVRKELERLSRDTERVLKRVREEIRKIEK

SEQ ID NO: 11875 - protein, 187 aa, Artificial Sequence; identical to SEQ ID NO: 11874
  Synthetic

SEQ ID NO: 11876 - protein, 187 aa, Artificial Sequence
  Synthetic
SEVEEVIRRVRKLLKDAKDLNEEVKRRLKELLDRVKRVSEKTKEDIKRLLEEVERVVRTKGGETEEVRRRIEDVVRKIRRLSEEIRRILEEVVRRAEELVRRLDELNRDIVRKVKKLAEDVLRSTGEDTDLAERVRDVLRRVAEAAKELSKDTKRVLDEVKKAIDELLKDNKRTVEEVEKEAKKTLK

SEQ ID NO: 11877 - protein, 187 aa, Artificial Sequence; identical to SEQ ID NO: 11876
  Synthetic

SEQ ID NO: 11878 - protein, 187 aa, Artificial Sequence
  Synthetic
DEVEKVKKTLKKLLEDARRRNEEVRKEIEDLDRELERLNRESKKRIEDLLEEVKRVVDRDGGEAEEVRRRIERVVEEIERLSREAAEMNRKVLEEIEELVDRLDRTNKKIVEEAKKLVEDVVRKEGEDTELVRELERVLDTVRREAERLSRKTREVVDESRRRNKKLLEEDERVVRKVVEDAERKLK

SEQ ID NO: 11879 - protein, 187 aa, Artificial Sequence; identical to SEQ ID NO: 11878
  Synthetic

SEQ ID NO: 11880 - protein, 187 aa, Artificial Sequence
  Synthetic
DEVKKVIDDIKDLLRRVEEVSRRVNKELERLLREVREVNKDVKRKLEELLRRVKEVVRRDGGESEEVKRIIDRIVEEAEELVRRVNRLNEEVVREAKELVDRSMKIIEKVVEDIERLVRELLRKEGEDTDLAERVRKVLEDVTRAAKELIKRDKKSLEDVKREIEKLSRDVKRVLEKVAEDAKDTLR

SEQ ID NO: 11881 - protein, 187 aa, Artificial Sequence; identical to SEQ ID NO: 11880
  Synthetic

SEQ ID NO: 11882 - protein, 176 aa, Artificial Sequence
  Synthetic
SEEEDLARVVERVERDLKRLDDDNKRVLDESRRRNEELVKRTAEIVERVRRELERLRREGRVSDEIVERVMREIEKLLRELERINRETIKRNKRLSEEASKINKEVTDRVRELLRDKSERVEEVKRTMEKLLDDVRKANEDSKREIEKSDDEVRKRNEEVVRDIERLLKEVEERAR

SEQ ID NO: 11883 - protein, 176 aa, Artificial Sequence; identical to SEQ ID NO: 11882
  Synthetic

SEQ ID NO: 11884 - protein, 176 aa, Artificial Sequence
  Synthetic
SEEEDLRRRAEEVHRRNEELLRDNERTVKKVHDRNRELLEDLRRVVERIERELRRLEEEGRVSEEEVRKVVETVRKLLKDVEKIVEDSSREVKRLSDEVREVVERSSREVKRLVEEKSSRVEEVKERIDRLHEELEKLSRTTKEKLKELHKRLEDVVREVKRRAEELLREIKERAD

SEQ ID NO: 11885 - protein, 176 aa, Artificial Sequence; identical to SEQ ID NO: 11884
  Synthetic

SEQ ID NO: 11886 - protein, 185 aa, Artificial Sequence
  Synthetic
SEVEEVRKVVEEVKRELRRLSEDSRRVVEEIVEADKRLSEKNETSVREVKKALKKLKDDGVVQEDVVTRVTEEIDRLLRESRESSRESVERIRKLLEDLERVSKEVLERLDRLLEDIERKLSDKDAEELVRDVIRRAREVLKRVEDVHRKVKKDLKKVHDDNKKISEDIDRRLEEVLRKVEEDDR

SEQ ID NO: 11887 - protein, 185 aa, Artificial Sequence; identical to SEQ ID NO: 11886
  Synthetic

SEQ ID NO: 11888 - protein, 185 aa, Artificial Sequence
  Synthetic
SEVEDVKRKVREIEKADEELSKRNEDSARESKKRLKEWSDDTKEVVERVRKRLKDLEDEGKVREEVVKRVKELLDELLDRLRKVSEEVLRRNDKLLKESRDSSRESVRRIRELLEDIRRKLEDEEAERLVREVTKEMKDVHDKNKKLSEDIDKRVEDTNRRLKEVHERVKEEAKKVVRDLEETAK

SEQ ID NO: 11889 - protein, 185 aa, Artificial Sequence; identical to SEQ ID NO: 11888
  Synthetic

SEQ ID NO: 11890 - protein, 185 aa, Artificial Sequence
  Synthetic
SLVETVEDVLREVEERLRKLLRDNEESVERIKKRDEDLSKENEESVKRVEDTLDELRERGVVDESVVKEVKRLVRELLKESRDSSKRSVEVVKELLDESRRVLKELKEEADKLVDRLRDLVDDERVEELVRKVIEDARRLLDDVRRKSERLDREAERVHRENKKLSEDLDRRVKTVVDDVRERAR

SEQ ID NO: 11891 - protein, 185 aa, Artificial Sequence; identical to SEQ ID NO: 11890
  Synthetic

SEQ ID NO: 11892 - protein, 185 aa, Artificial Sequence
  Synthetic
SLVEEVEKEARDIERRDDELSKRNEKVARDIEERDRRLSDEVREVVKRVKRELERLVESGEVDEDVVRRVLELLKEILEEVERSSKKSVDVVKKLLEESEKSSRDSVREVRRLLKEIRDKIDDKDAEKLVRRVIKDLRKLHKENEDLSREIDKRLEDAHKRNRDLVEEVKKRMERVREEVERAAR

SEQ ID NO: 11893 - protein, 185 aa, Artificial Sequence; identical to SEQ ID NO: 11892
  Synthetic

SEQ ID NO: 11894 - protein, 185 aa, Artificial Sequence
  Synthetic
KEKEDVKKVVEDIERADKKLSEDNRRVVKRIEEADRKLSKENKESVERAKKRLDDLERRGEVDRRVVTEVEKTLKEILERSERSSKRSREEVKRLLEESEDSSRRSVEEIRRLLKEIEDKLSREEAEELVRRVIKEMEEVHKRNRDLSKRLDDELKRIHKENEDRLRRLDEEIEKVVKKVEDDAR

SEQ ID NO: 11895 - protein, 185 aa, Artificial Sequence; identical to SEQ ID NO: 11894
  Synthetic

SEQ ID NO: 11896 - protein, 185 aa, Artificial Sequence
  Synthetic
SLVEELRKDVEEIKKRLKRLVEENEKVVREVTEADKKLSKELEDEARDVKRALEELRRRGEVDERVLRRVLEIVDELLERARESSRDSERVVRELLEESRRVVEEVLRRIEKLLEELERLISREEVEELVRRVREDMERVVREVEKVSRDLDREIRRVHRENRELIEDVKRKARKVLRDAEEEAR

SEQ ID NO: 11897 - protein, 185 aa, Artificial Sequence; identical to SEQ ID NO: 11896
  Synthetic

SEQ ID NO: 11898 - protein, 185 aa, Artificial Sequence
  Synthetic
KIVEDVEKVVKEVDDRLKKLVDDNERKVREIIRRDEELSEKNEKSVRDVKEELKRLAEEGTVREEVVRRVEEELRRLLEESRRSSDRSRKRVKKLLDDSRRVADRVREELERLLREVRKKADREEVEKLVREVIDRMRRVVREVEEMSKRLDEELEEVHRRNRETLTRIDEEAKKVVDDVDRRAR

SEQ ID NO: 11899 - protein, 185 aa, Artificial Sequence; identical to SEQ ID NO: 11898
  Synthetic

SEQ ID NO: 11900 - protein, 183 aa, Artificial Sequence
  Synthetic
SVRETLEEVLRRIAEAIDELIKTLEKVLEESRREIERWKKENEDSLREIKKKLEDLEKKIEDERVVRDIRRVLEEVRRLVEESKKILDEVVEDNERLVRELVKELEDVKRKVEELVRDVKRDNTEEKAKRALEEIKRLLERVKKRVEEALEEIKKSNKEAADIVRDIDRRLEELLRTVADKTR

SEQ ID NO: 11901 - protein, 183 aa, Artificial Sequence; identical to SEQ ID NO: 11900
  Synthetic

SEQ ID NO: 11902 - protein, 177 aa, Artificial Sequence
  Synthetic
DEVEEVIKTSREINDRVRRELERVLRRSEEIIEEVAKSIEEVIKESEDIIRKVEKDGDEEALRRAVEESTRLVEEVKRELEEVVERSTRLLEELVRILEEALRRSEELVRDLEARVDKEELKRKIRDVLRDDERAARKWVRDLEEVNKRTEDKIRELLRKLEEVNEKTERDIRRREK

SEQ ID NO: 11903 - protein, 177 aa, Artificial Sequence; identical to SEQ ID NO: 11902
  Synthetic

SEQ ID NO: 11904 - protein, 177 aa, Artificial Sequence
  Synthetic
EEVERVIEEIKKLLKDVAELVERVIKEIRKILDDVAKENKRLLDESRKIIKEVAERGDERMLEDAVRRSNELLKEADRINKEVLKRVRELVKEVERILRDVLRRVDELVKELEKRVDKEEVKRKIRKVLKEIKEEIEKLLKKLRDALRDVEEKIRDLTRRAREVNEKSREDLERRKD

SEQ ID NO: 11905 - protein, 177 aa, Artificial Sequence; identical to SEQ ID NO: 11904
  Synthetic

SEQ ID NO: 11906 - protein, 177 aa, Artificial Sequence
  Synthetic
DEVEDVIRRLEEIIREVEDRLRKILETSKKIIKEVEDENRRVVTEIERILREVEKRADERMLEKVLDDIRKLVEELDRINRKAVEISNRLLEKAKRILDEVLRRVTKLVEDLKDKVDKEELKRRIEEVLERLRRKIERLAKELKDVNDESEREARRLTEEVKRVLEEVARRIKEAAE

SEQ ID NO: 11907 - protein, 177 aa, Artificial Sequence; identical to SEQ ID NO: 11906
  Synthetic

SEQ ID NO: 11908 - protein, 177 aa, Artificial Sequence
  Synthetic
REVEEVRKKIEEDIDRVDKELKEVLETSRDILRRVAKENEDVLRDLERLVDEVRRDSDKDLLEEVLKRVEDLVRELDRKNKEVAERSTRLIEELAKILDDVLKRVEELLEELKRRVDKEELKKKLEKVVRDLSKRLEELLKELEKVNEEVKRRLERLTEEVRKVLEEITKKLKERAR

SEQ ID NO: 11909 - protein, 177 aa, Artificial Sequence; identical to SEQ ID NO: 11908
  Synthetic

SEQ ID NO: 11910 - protein, 177 aa, Artificial Sequence
  Synthetic
SKVEEVMRRLKEILKRVAEELEKVLTESEKILRDVADENRRVMEESRKILKDVAERGDEKALEDALRDSSRLVKDLDEKNRRVLETSTELIERLKKRLEEVLREVKELVDRLKKDVDKEEVKKKIDKVLEDVRKELDDLRRKLEEVNKRIEEEIRRLTEDVRRVNDEIRKRAEDRKR

SEQ ID NO: 11911 - protein, 177 aa, Artificial Sequence; identical to SEQ ID NO: 11910
  Synthetic

SEQ ID NO: 11912 - protein, 182 aa, Artificial Sequence
  Synthetic
SLREKADEVVKRIKERLDRLEDKSREVVKDSRRKLREWYEKSKRAVEDIETKLDELRKDLTDKKAEEILRKVKEDVKRVHEENERILRELKKITDKLHEENKKIIDDVKRKVEDVLRRVRDVDKDMVEELIRELEKIVTDVAKKVEDTIEESRKINEEVAKRVEDTIKRLEDILRDVARRVK

SEQ ID NO: 11913 - protein, 182 aa, Artificial Sequence; identical to SEQ ID NO: 11912
  Synthetic

SEQ ID NO: 11914 - protein, 182 aa, Artificial Sequence
  Synthetic
SLREKVDKVVEEIKRKLDKLLEDSERVVEKSERDLRRWLKEAEEVVREIEKTLKELEKRARDDRLRKIIDEVRKRVERVLEEVEKIIDELRKRSETVHRRNETIIRKVEEDVKRVRDRIERVDKDVVEDLIRELEEIVRRVAEEVRTTIEDLRKINDEVREKVKRLIEELKKILDDVAEEVR

SEQ ID NO: 11915 - protein, 182 aa, Artificial Sequence; identical to SEQ ID NO: 11914
  Synthetic

SEQ ID NO: 11916 - protein, 182 aa, Artificial Sequence
  Synthetic
SLEEKAREVVKEIRRRLDELLRKSHDVVREIEERLDKLEKESEDAVREIEKRLDELAKRITDERAKKILDEVKKEVRRLHEENRKILEEVKKEVRRVNDENRRIIERVKETVDDVLRKVSRVDAKVVEKLIKELRDILREVAERVERTIRRLREIVKRVERKVERSIEEMERIVREAEEETR

SEQ ID NO: 11917 - protein, 182 aa, Artificial Sequence; identical to SEQ ID NO: 11916
  Synthetic

SEQ ID NO: 11918 - protein, 182 aa, Artificial Sequence
  Synthetic
SLREKVDEVVKRIEKRLEELIRKSRKANEDIRKKLEELIKKSEDVVRKIKRELEELKRRVTEDEVKEIIERVLERVERVNEENRKIIEDVLRKSDEVDRRNKDILRRVRERVDEVLEEAKDVEREVVEDLIRELEEILRKVAEEVEDTIRRLEKILKEVAERVERTIKDLEDIVRDVAEKVK

SEQ ID NO: 11919 - protein, 182 aa, Artificial Sequence; identical to SEQ ID NO: 11918
  Synthetic

SEQ ID NO: 11920 - protein, 182 aa, Artificial Sequence
  Synthetic
SLREKVKRMVEEVKRELDELEKESNRAVERVERELEKLIRKSERVNERIRERLKELAARSTDKKVEKILRELKKLSDELDRTNKEIIDRLRKEVREVNDRNRKIIEDVEDFVRRAEDRLRDVEDKVVEKLIKEVRDIVKKVAEEVKKTIEDVERKVKEVAERVEDTIRRLDEAVKEVEERVR

SEQ ID NO: 11921 - protein, 182 aa, Artificial Sequence; identical to SEQ ID NO: 11920
  Synthetic

SEQ ID NO: 11922 - protein, 182 aa, Artificial Sequence
  Synthetic
SLREEAERVIREVREDLDRLRRESKKVNDRIRRTLDELRKRSDDAVRDIKEKLKELAKRTTDEKVKKILKDVEDEVEKVNRENREIIKELEKVSNDLDRRNKEILRTLKKLADEVLERVKDVDKDVVRELAERLKRLLEEVEKRVKDTIRELEKIVEEVRKRVEDTIRRLEEVLDKVAKEVT

SEQ ID NO: 11923 - protein, 182 aa, Artificial Sequence; identical to SEQ ID NO: 11922
  Synthetic

SEQ ID NO: 11924 - protein, 184 aa, Artificial Sequence
  Synthetic
SIEEELKKVLKEIEDRVRKSDKENKEASERIKRTVEELERRLREVLRRIEEAVRKLVREKGEETELVEEVRRLVEELRDRLRKVIEDIRDLVRRLVEHNKRVSDEVKRRVEELKRILEEVLRDSDEKKVKEVVDELRKLLRELEKLSEESNRKLKKLTDDIEKLVRDVEKELRKLLKELAEKIK

SEQ ID NO: 11925 - protein, 184 aa, Artificial Sequence; identical to SEQ ID NO: 11924
  Synthetic

SEQ ID NO: 11926 - protein, 183 aa, Artificial Sequence
  Synthetic
SVEERLKRVLERAREEIKRLLDELERVLEESRKEIKKLSEDLTRANEDTRREIEKLAREITDERLREILERVVRESTRLVEEVHRINEKVLRDNTRLVDEVRKILEEALKRVEELIEELRRVDDERIVKKVEEEIEELVRRVEKRVREVKKRMEDSNREVRKANEEVKKRSEDLLRKVRRDAE

SEQ ID NO: 11927 - protein, 183 aa, Artificial Sequence; identical to SEQ ID NO: 11926
  Synthetic

SEQ ID NO: 11928 - protein, 183 aa, Artificial Sequence
  Synthetic
RVRDELREVLRKAREDIKRLSDKMREVLRESEEKIKRLSDDLRRVNEETKKEIDRLRKEIDKEELKEILKRVVEESTRLVEEANRINREVLRRNEELIREVDRINKEALEEVERLVEELKRVDKKEIFRKVEKEIEDLLEEVRDVNRKIEEEARRSNEDVERVNREIKKRSEELLRDVEKKTE

SEQ ID NO: 11929 - protein, 183 aa, Artificial Sequence; identical to SEQ ID NO: 11928
  Synthetic

SEQ ID NO: 11930 - protein, 183 aa, Artificial Sequence
  Synthetic
SVREELKKALDRVRESIRRLSEELREVLERSEDTIRRLVEDLERVNEETRREIEDLARKIRDDRLRRILEEVLKESTRLVEEVKRILKRVLDENRRLVEEVDRINKDVLREVRRLVEELRRVDDERIMKEIEKRIEDLEREVKEVNREVIERAEESNRRVEELVREAKKRSRELLKRVREEAK

SEQ ID NO: 11931 - protein, 183 aa, Artificial Sequence; identical to SEQ ID NO: 11930
  Synthetic

SEQ ID NO: 11932 - protein, 183 aa, Artificial Sequence
  Synthetic
SVREDLERALRRAAEEIEKLSRDLKRVLEESRKNIERLRRDIERMNEETEKEIRRLAREIDKEELKRILEEVLKRSTELVKRLTEILKRVLDTNTKLVEEVDEINKRVLDEVRKLVERARRVDREEDAEEIKTRIKELIDRVRRVNEEVKERMKKSNEEVEEVVRRVKEESKRLLERVEEDVR

SEQ ID NO: 11933 - protein, 183 aa, Artificial Sequence; identical to SEQ ID NO: 11932
  Synthetic

SEQ ID NO: 11934 - protein, 183 aa, Artificial Sequence
  Synthetic
SLREDLRRVLERARDELRKLSKELKEVLKRSRDNIRKLSEDVKRANERTEEEIRRLTKEIDKDELREILERVLRTSTELVKELNKRNRDVLRENERLVREVDKINKDAAREVTKLVEELDRVDKDEIFKRVKKEIKELVDRVREVNKDVIRRMKKSNDEVKRENEKVIRESEKLLKDVEDARR

SEQ ID NO: 11935 - protein, 183 aa, Artificial Sequence; identical to SEQ ID NO: 11934
  Synthetic

SEQ ID NO: 11936 - protein, 183 aa, Artificial Sequence
  Synthetic
SVRERLEKVLKEVEDSIKELSDDLRRVNKRTEEEIRRLAEDLERVLERIEREIRKLAKEIDKDELREILKRVLEEVERLVREVKEILRDVVRRSSELVERVDKINKDVLEEVRRLVEELRRVDKEEIAERVERTIRKLEDDVRKVNEDVKRRSRELLERVARLVERVKEEAEKLLEDVKRKAD

SEQ ID NO: 11937 - protein, 183 aa, Artificial Sequence; identical to SEQ ID NO: 11936
  Synthetic

SEQ ID NO: 11938 - protein, 183 aa, Artificial Sequence
  Synthetic
SLREDLERVLEEIERELKELSDDLRRMNEETEREIRKLSDDLRRALEKIRDEIRKLAEEIDDKRLEDILRKVLREVEELVKEVNRINREVLRRSSELVKRVDEINKKVLDDVRKLVEELKRADKEEIFRKVKEEARRLVREVEEVNKEVKKRSRDLLREVRKVNEDVKREIERLLRKVAKDAE

SEQ ID NO: 11939 - protein, 183 aa, Artificial Sequence; identical to SEQ ID NO: 11938
  Synthetic

SEQ ID NO: 11940 - protein, 183 aa, Artificial Sequence
  Synthetic
SMREDLRRVLEEAEKKIRKLSKEAKDANRETEKEIRKLSEDVKRVNKESKDEIDRLAEEITDDRLRKILEKVVRESNRLVERLNRINRKVLKESSELIKEVDEINKKVLRDVEKLVEDLKRVDKKEIAEKVKREIEKLVRDVERVNREIIERSEKLLREVREENERVKRESRRLLKEVEKAAE

SEQ ID NO: 11941 - protein, 183 aa, Artificial Sequence; identical to SEQ ID NO: 11940
  Synthetic

SEQ ID NO: 11942 - protein, 183 aa, Artificial Sequence
  Synthetic
SVRETLKKVLEDVRRELKKLSDKLRKVLEDSRRNVKRASDKLREVLKRVKEEIERLRREIDKKELEEILERVLREVKKLVEDVNRINRKVLKENTDLVREVDDINKRVAEEVDELVERLKRVDKEEIAKRIIEEIKKLLDRVREVNEDVIRRMKKSNEDLDRRNEEVRKRIEDLLEKVARDAK

SEQ ID NO: 11943 - protein, 183 aa, Artificial Sequence; identical to SEQ ID NO: 11942
  Synthetic

SEQ ID NO: 11944 - protein, 185 aa, Artificial Sequence
  Synthetic
SLEETAKEVIERSEDHLRRLEETNRKVVEDSERHLDDLTRRIKKVVEDIKKRLDEIEKRGEVDERVLRTLAKKVEDLLRRVEEVVRRVKERTRDHLRDSERVLRELLELSKRILERVRRKSSDERAEELLRTVVKEIEDANRRVEEVSRKNTEDIKEWNKRLEEELRRVVERARRELKKVEDAAR

SEQ ID NO: 11945 - protein, 185 aa, Artificial Sequence; identical to SEQ ID NO: 11944
  Synthetic

SEQ ID NO: 11946 - protein, 185 aa, Artificial Sequence
  Synthetic
SLEETAKRVIEESRKHLDRLRRENERVVKEIRDALRELEKKVEDVVRRIAEELERIRKEGKVPEDVVREVRKTVEKLLRELEDVIRRLKELVDRHLEDSERVVREVKRISDRLLEEVKRKSSREEAEDLLRKVIEDIKELNRELERVSRKNIEDLRRWLEEVREMVKRVEEKAKRVLEELREAAK

SEQ ID NO: 11947 - protein, 185 aa, Artificial Sequence; identical to SEQ ID NO: 11946
  Synthetic

SEQ ID NO: 11948 - protein, 185 aa, Artificial Sequence
  Synthetic
SLEETIEKVVERSKRNLEKLRREIRKVVKESDENLKDVERRAREVVEEIKKALEDIRRKGDVDERVVEEVKRDVDRLEREVKRVLDDLRRVTEELLKRVEDMVRRVLEVSEKLLKEVKDKSSREEAEELLRKVIKESEDLNRRLREEVKKVVREIEEANKRVNDTVRKMEEALKKLLDDLREKAR

SEQ ID NO: 11949 - protein, 185 aa, Artificial Sequence; identical to SEQ ID NO: 11948
  Synthetic

SEQ ID NO: 11950 - protein, 185 aa, Artificial Sequence
  Synthetic
SLEEDMKRVVDESRRNLERVEKENRDVVKESRDNLKKVEDDIRKVVKDIRDELEKIRKRGEVDETVVKRVMDTVRELLKEVKRVIDEVRRRTDEHLKHSKEVVERVLKISEDLLREVEKKSSREEAEELVRRVKETSKRVNEELDKTAKKNVDDIKDWNRRVNEKVKKVKEDAERVLRELEETAR

SEQ ID NO: 11951 - protein, 185 aa, Artificial Sequence; identical to SEQ ID NO: 11950
  Synthetic

SEQ ID NO: 11952 - protein, 185 aa, Artificial Sequence
  Synthetic
SLEETITKVVEESKKNIDRLLEEVRKVVEDSRRDLDRVIDEARKVVEKIDRELKRIEKRGDVDKRVVEEVRKEVKELLDRVREMLERVKRVSDKLLEDLRRLAEEVKKLSTDLLEEVRRKSSREEAEELVRRVKKRSEDVNKKLDEDVEEMKRRSEKLNKDINKDVDRVRKRLEEVLKRLREAAK

SEQ ID NO: 11953 - protein, 185 aa, Artificial Sequence; identical to SEQ ID NO: 11952
  Synthetic

SEQ ID NO: 11954 - protein, 185 aa, Artificial Sequence
  Synthetic
SLKDEIKKVVDDSRRNLEEVKKEITRVVKESRERLEELERDIERLVEKVTRELDRIEEEGRVDSKVVRKVKELIKRLLEEVREVIERLRRRTEKLLEDVKRVVEEVLKVSEKLLRDVERKVSREEAKELVEEVIRRSREVNRDLNRRVREVEKESRDANERVKRRVEEVKRRAREVLERLKKAAE

SEQ ID NO: 11955 - protein, 185 aa, Artificial Sequence; identical to SEQ ID NO: 11954
  Synthetic

SEQ ID NO: 11956 - protein, 185 aa, Artificial Sequence
  Synthetic
SLEEDAKRMVDTNEDRVREWERKIDKVVKDSEKRLRELREDAERMVREIKKELEKIRTEGRVPKEEVKKVLDRVDELLERVEEVVRRVLRVTEELLKEVKRVLKENKEILDRLLKEVTDKSSDERAEELVRRLKKASEDSNEKVARLIEEVIKRSKDVNDDLERDLREVKKRLKDVLKRLKEKAK

SEQ ID NO: 11957 - protein, 185 aa, Artificial Sequence; identical to SEQ ID NO: 11956
  Synthetic

SEQ ID NO: 11958 - protein, 185 aa, Artificial Sequence
  Synthetic
SLEEDAKRAVEESKRTLRELEEENKKVVEDIRRALRRLEEDIKRVVEEIRRELDRIRREGRVDERVLRDVKRLVDELLERVREVIKELEELVKRHLDHSKTVIDRVDEITEELLKDVERKSSDERAEELVRRVKKTIEDVNRKVAKVVKENIKRLREWLKRVEERLKEVKDRLRKVLEDVERAAK

SEQ ID NO: 11959 - protein, 185 aa, Artificial Sequence; identical to SEQ ID NO: 11958
  Synthetic

SEQ ID NO: 11960 - protein, 180 aa, Artificial Sequence
  Synthetic
DVEEDVKRVADDNRRELERWRRDVKKVADEVKDRSRKLERDVERRIREIEKTLEDLRREGLDERVIETLARILKRLLDEVKKLLKDNERVVDRVLTEVDELIRRNEESVRRILEDVKKDRTKEVVKRLKEESKKSNEDVARRVEKLKEELERSTREVERAVRELKKELDEVVREVKERAK

SEQ ID NO: 11961 - protein, 180 aa, Artificial Sequence; identical to SEQ ID NO: 11960
  Synthetic

SEQ ID NO: 11962 - protein, 180 aa, Artificial Sequence
  Synthetic
SIEERLDKLLRDVKRALEELEERIRRSNKRLREAVEKLKKEVEDSNRELDKAVKEVLRRKDEEKAKKLAEAVKRSLDKTRKLVEDVARAIEESLKRVEEIVKRVLKAIEEILEEVRRKVRTEEAVRTAADLLRRVLERVKRLAEELHRHNKEVLDEARKIARDLHRLNEEVLRRVEEATK

SEQ ID NO: 11963 - protein, 180 aa, Artificial Sequence; identical to SEQ ID NO: 11962
  Synthetic

SEQ ID NO: 11964 - protein, 180 aa, Artificial Sequence
  Synthetic
SIEEDLKRLLDEVRKRSKDLKEEVKRSNDRVREDLKRLKEEIDRLLEEARRRLEEIIRRKDREEVKKLLDKIEKVLREVEETVKRLEEDIERSLKKSEELVERALKHDEDVLEDVERRVRDKELVDRARDKIRESLRRSEKIIEELHEHNKDALRRVREEIKRLKDKLKKVVEEVERATR

SEQ ID NO: 11965 - protein, 180 aa, Artificial Sequence; identical to SEQ ID NO: 11964
  Synthetic

SEQ ID NO: 11966 - protein, 178 aa, Artificial Sequence
  Synthetic
DSVERVKEESERTNREIAKLSKKVEDETRKVLKDLEDISRDTERRSREVLERARRDKDKDLLEKLLRDLTETHKEVIKTLEKLLEEVKRIHDRTVEEARRLLEESERIVRKVIKETGEEAELVRELEEVVRENEERVRRLIERNKKLVDDARKRVEELVRRNDKIVKEIEKVVRDIKT

SEQ ID NO: 11967 - protein, 178 aa, Artificial Sequence; identical to SEQ ID NO: 11966
  Synthetic

SEQ ID NO: 11968 - protein, 178 aa, Artificial Sequence
  Synthetic
KSDEEVEKLIREVLKRIEELSREAEKLTDEVRKLLKEISDRVEERSRDVLDKIRRTNDEEVIRRLITELEKEHEEVMRELDRLLKELEDIHRRTIELAKRLLKKVEEIVEKVIREEGEEAELVRKLEKLLEDAERRVRELVKRNKEVVERVKRTVDELKARNKKIVEEIKKVMEEITR

SEQ ID NO: 11969 - protein, 178 aa, Artificial Sequence; identical to SEQ ID NO: 11968
  Synthetic

SEQ ID NO: 11970 - protein, 178 aa, Artificial Sequence
  Synthetic
RELEEVEKKVRTVLEEVRRISEKAEELSRRVLEEARKISEDNEREVRRVVEDVRRENDRELLKKLLEEVRRSSEEVIKRLEDLLRKLEEEHKRVIDKLKDLLRRVREIVEEVIRRTGEEADLVERLKELVKKVEDEVRRLVKRNKDIVDDIRRRVEELVRRNKRITDEVRKEADKLRR

SEQ ID NO: 11971 - protein, 178 aa, Artificial Sequence; identical to SEQ ID NO: 11970
  Synthetic

SEQ ID NO: 11972 - protein, 188 aa, Artificial Sequence
  Synthetic
SELEKVKKEIRELLEEVRKISKESEDRSRKSNDELHKSSEEVEKRIRDLLRELEKIVRELKDGDRETVVRVLDRVVEEVRRIVEEDKRRIEEVLKRDKKLVEESVRLIEKVVRDIEEIVKELERRLREKKDVVKELREVLERAEREARKLIKRNDEILKESEKNARDLIRRTEELLRRAKKRVDELKK

SEQ ID NO: 11973 - protein, 188 aa, Artificial Sequence; identical to SEQ ID NO: 11972
  Synthetic

SEQ ID NO: 11974 - protein, 188 aa, Artificial Sequence
  Synthetic
SDVEEVKKEIARLLEELKRTTDKVKEDSDRSNEEVHRSSEKVKKDIEKLLDELRKVVEELKDGSREEVERLLEEVVRRVKKIVDEDKKKLDDVAKRDEDIVRKDVEELKRVVEEVRRIIAEVKRRLKDLREVVKELEDVLKRAEEVVERLEEKTRRILEESRKNIERLKRETEEMLKRAEDEVKKLKD

SEQ ID NO: 11975 - protein, 188 aa, Artificial Sequence; identical to SEQ ID NO: 11974
  Synthetic

SEQ ID NO: 11976 - protein, 188 aa, Artificial Sequence
  Synthetic
SLVDRVRELIERLLRRLEEIVREVEERLRRSNERLHESSADVERLIRELLERLRDIVRKLEKGDREKVKKVLKEVVEEVRDIVRRDRELLDKVVEENADIIRRVVEELRRVVEEVEKIVRDVKTKLRKDEDVVRELEELLRRAKERVDELKKRLEELLKESREDVERLKKKTDEALKRAEEEVEKLRK

SEQ ID NO: 11977 - protein, 188 aa, Artificial Sequence; identical to SEQ ID NO: 11976
  Synthetic

SEQ ID NO: 11978 - protein, 188 aa, Artificial Sequence
  Synthetic
RDLEEVKKRIDELLKRVRETTKRVEDELRRSNKELHESSRRVEEEIKKLLEELEDVFRKVKDGDRERVKELADRIVEEVKKIVDEDVERLERVVDENRKIVDTDRRDLDRVVEEVTRIVEELKRRLKDKEELVRTLEDMLRRAREEIEKLKEKTRKLLEDSERDVKRLIERTTEVLKRARERVEELKK

SEQ ID NO: 11979 - protein, 188 aa, Artificial Sequence; identical to SEQ ID NO: 11978
  Synthetic

SEQ ID NO: 11980 - protein, 188 aa, Artificial Sequence
  Synthetic
SELEEVKKRIDDLLKRLRDIVDTVRKELRKSDKELHDSSKRVEEEIKKLLEELRRIVETLKKGDREKVTRMLREVVRRVREIVKRDVEELKRVVERNAKIIEDVERELKEAVDRVREIVKELERRLKDLREVVETLRRVLKRAEDDVRRLLEELRELLERSKRNVERLIERTKELLKRAEDEVKKLED

SEQ ID NO: 11981 - protein, 188 aa, Artificial Sequence; identical to SEQ ID NO: 11980
  Synthetic

SEQ ID NO: 11982 - protein, 188 aa, Artificial Sequence
  Synthetic
SLLEKVEEEVRRLLKRLRDIVEEVRRLLEESNERAHRSSKKVKEDIDELLKELEDVVRRVKKGDEEAVRRLLDEVVKTVEEIVRRDVELLREIVEENERIIRKVEEELKRVVEEVRRIVDDVRRKLKDNKDLVKTLEDILERAEREVKKLEDRLRKLLEDSKRNAEELIKRTEDVLEEALRRVEELKK

SEQ ID NO: 11983 - protein, 188 aa, Artificial Sequence; identical to SEQ ID NO: 11982
  Synthetic

SEQ ID NO: 11984 - protein, 178 aa, Artificial Sequence
  Synthetic
SEAERVREILKDAEKKIRDILRRLREINRESARRIEDIKRKLDEILKRNEDDVRRLEKDGADKEILKRALERAEKSVRELRDILKKVLDESSRLVKELEKILRDLLDEVRRLVEEVEKRGDGVEDAERTVRELIKRVEEALERAERASRELIKTVEKVLEEVERRNRKSNEELKEATR

SEQ ID NO: 11985 - protein, 178 aa, Artificial Sequence; identical to SEQ ID NO: 11984
  Synthetic

SEQ ID NO: 11986 - protein, 187 aa, Artificial Sequence
  Synthetic
SLEEEAKELVKRVRDELRKIERTIEKIVEDSRRRLEENRKRNKELIERVEKELRELKKRVTDERIKKVVRDVLEKARKLLEESEEMVRRVERISERTLRTVREVVKEVEKIVEKLLEDVKRKSSDERARDILREAKKMLEKVLRDLRRVLEELRKENEKVLRELEEISKETEDRLREVLRELRERTR

SEQ ID NO: 11987 - protein, 187 aa, Artificial Sequence; identical to SEQ ID NO: 11986
  Synthetic

SEQ ID NO: 11988 - protein, 175 aa, Artificial Sequence
  Synthetic
SVEDEVREVAKKIRRILEKLKRELDRHSKKIEDILEEIRDKNEKAKEEIEEVLRRRLDEEIKREVKRLEERLDEVSDKTRRAVEELIRNNERVVREVERVVRELIEILKEVLRKGGKEDVERVKRELEKVLRELAEEVRESLERVSEVAERLKRENDEVNDRLKKMLEDLLRKAT

SEQ ID NO: 11989 - protein, 175 aa, Artificial Sequence; identical to SEQ ID NO: 11988
  Synthetic

SEQ ID NO: 11990 - protein, 175 aa, Artificial Sequence
  Synthetic
DEVEEVIRRVEESNKRVNEENDRVVRESKEIVRKVEEDNRRAIKESEEMLDRVAKDRDRDKLRDVLRRLKELHRRTIETTKEMADRIRKLHEETIRRTREVLERNRRLAEDVLRRVPNVEEDLRRVVDKSRKNVEEVERKNRDVLRRIDKRAKELEDRNREVLKKIEKTIRDLEK

SEQ ID NO: 11991 - protein, 175 aa, Artificial Sequence; identical to SEQ ID NO: 11990
  Synthetic

SEQ ID NO: 11992 - protein, 175 aa, Artificial Sequence
  Synthetic
SEVDEVIRRVEKSNKDVNDENKRVIDRSKELNREVNERNKEAIKRSRDLADEVRRDRDRKKAEEMVRRIEELHRETIKRTKEVNEEIERLHRETIKRTREVLDENRRLAERVVREVPNVEERLREVVKRSEDNVRKVEEDNRRVLEESTRNVKEVKERNEKVLEEIRKTLEDLER

SEQ ID NO: 11993 - protein, 175 aa, Artificial Sequence; identical to SEQ ID NO: 11992
  Synthetic

SEQ ID NO: 11994 - protein, 175 aa, Artificial Sequence
  Synthetic
SEVDKVRKELEDMAREIEKRAEDVIREIKRSNEEVNRTNEKVIRDSERMLEKAERDRDREKLRRIVRTLEKLHEDTIEFTKKVLERNKELIKKIAEELRRVLKELTERIKDVLRRVPNVEERLDRVREKLERIVREIEDRLRKVLEDSRRNVEEVRRRNEEAVKKIRRILEELER

SEQ ID NO: 11995 - protein, 175 aa, Artificial Sequence; identical to SEQ ID NO: 11994
  Synthetic

SEQ ID NO: 11996 - protein, 175 aa, Artificial Sequence
  Synthetic
DEVDDVIRDVDRTNEEVERENRRVIEEVRKSNEEVNKKNADAEKRSREMAERAAEDRDRRKIEEILERLKDLHKRTIETTREVLKRNEDLMRRTIEDTRRVLRENEEKLRDVLRRVPNVKEKLDRVLERSKKTVEELEKRNREALDRSRRNVEEVEKRNREVVKEIAERVRRLKK

SEQ ID NO: 11997 - protein, 175 aa, Artificial Sequence; identical to SEQ ID NO: 11996
  Synthetic

SEQ ID NO: 11998 - protein, 175 aa, Artificial Sequence
  Synthetic
SEVDKVVEDVKRMLKEVEDRNEKVIRDVEKMLREVEEKNKRVIEDSERVAKEAADDRDREKVRRLLERIRELHERTIKETRDVARELAKLLEDTIRFTRKVLRELEELLRDVLRRVPNVKEKLDKVLEEIREIVKRLEDRNREALRRIKEIVDRLEKRNRKVVEDVERIVREIER

SEQ ID NO: 11999 - protein, 175 aa, Artificial Sequence; identical to SEQ ID NO: 11998
  Synthetic

SEQ ID NO: 12000 - protein, 175 aa, Artificial Sequence
  Synthetic
SEVDEVIKRIEETNRRVEEMNKDAIRRVKESNKRVEERNKEVIERSKKLIDDVRRDRDRKKLREVLERIKDLHRRTIEDTRRVLKDNDELVRRTIEKTRRALERNKELIDRVLKRVPNVEERLRKVLKDSERTVKELEKRNRRVLEESDKEVKRLEKENRDVVDEIRERAKEIER

SEQ ID NO: 12001 - protein, 175 aa, Artificial Sequence; identical to SEQ ID NO: 12000
  Synthetic

SEQ ID NO: 12002 - protein, 175 aa, Artificial Sequence
  Synthetic
SEVDKVITELEKMLRRVKEENKRVIDESRRALEEVEKRNREVIERSDEMARRAAEDNDRRKIREILKTLKRLHEEAVEDTRRVLERLRRLHEKTVRDTKTVLDRLRELIEDVLRRVPNVEERLREVLERIARRVRELEERNKKVVKEIEERVRELERRNREVVKKIEEKVKRLET

SEQ ID NO: 12003 - protein, 175 aa, Artificial Sequence; identical to SEQ ID NO: 12002
  Synthetic

SEQ ID NO: 12004 - protein, 175 aa, Artificial Sequence
  Synthetic
DEVRKVIKELRDELRRVEELNKEVIDRSRKLVEDIARESKEVIERSRKLLDDVRKDRDREKLERVLDEIRRLHEDVLRKIREVVRTIEELHRDAVRKSKEVLKRLEELIRDVLRRVPNVREDLERALKEIEETIRRLEKRNRDVLKEIEDEARRLEEENRKVLKEARKIVEDIKT

SEQ ID NO: 12005 - protein, 175 aa, Artificial Sequence; identical to SEQ ID NO: 12004
  Synthetic

SEQ ID NO: 12006 - protein, 175 aa, Artificial Sequence
  Synthetic
SEVDDVTRKLERILEELTETSERVVRTSRRVAEELEKRSKEAVERSRKLAEEVARDRDREKLRRVLKEIEKLHRDTVKDLRDALKKIEDDHRRVVEKLKKALEELERLIRRVLREVPNVREKLERVLEEIRRRIEELSEKNRKVVKDIREIVRKLTERDEKVVREIKKIVDDIET

SEQ ID NO: 12007 - protein, 175 aa, Artificial Sequence; identical to SEQ ID NO: 12006
  Synthetic

SEQ ID NO: 12008 - protein, 175 aa, Artificial Sequence
  Synthetic
SEVDEVTREVEELIREVEKLSEDVIRTSKELAKRAEKLSREVIKRSEELIDEVRRDRDRRKLDEVVKRIEDLHRRVLEELERIVREIEKLHRETVKRLREVLERVRRLLEEVLERVPNVKKKLEDVLREIAKKVREIEERDRKVVEEIREILKRLEDENREVLKKIRRIAEEIRR

SEQ ID NO: 12009 - protein, 175 aa, Artificial Sequence; identical to SEQ ID NO: 12008
  Synthetic

SEQ ID NO: 12010 - protein, 175 aa, Artificial Sequence
  Synthetic
DEVRKVIKELEDRLREVEKKSKDAIDTSREMLKRVDDENKDVKRRAEEILKRVDEDRDRKKLRDVLRELERLVRETIKSSKEVLDRLRKLHEDTVRDLRRILKELKELIDDVLRRVPNVEEELRKLLEDIREKVERIVKRDEDVVREIEEEARRLADENRKVLEEIERIIRELER

SEQ ID NO: 12011 - protein, 175 aa, Artificial Sequence; identical to SEQ ID NO: 12010
  Synthetic

SEQ ID NO: 12012 - protein, 178 aa, Artificial Sequence
  Synthetic
REVDEVTRRIKELNDELERRVRRAKERIEELNKRVNREDEEIVDRVRKLNDELAKDNKRELVDEVLKETEKLIRRSEESVRRVLEETEKLIETLRREVEKVLRETERLIKEVVERRKDDEDVKRKLKEVVDESRRTVDEIRRELERVVEKSRKNIEEVKKHTREVLKRSEETARELKK

SEQ ID NO: 12013 - protein, 178 aa, Artificial Sequence; identical to SEQ ID NO: 12012
  Synthetic

SEQ ID NO: 12014 - protein, 178 aa, Artificial Sequence
  Synthetic
SEVDRVLEEIRKLNEDLNRRVDDATRKIRDLNRKLNEDVKKVTEDIKKLNEDLRKDNKKELVREVLKRTRDLIRELEKIVTDVLRTTEEVIKRLEREVEKVLRDTRELARDLLRKRKDDEEVKRKLEKLVRESERNVREVKKKLDEVRKESKTNADKVREELKRVVEESERTVRELEK

SEQ ID NO: 12015 - protein, 178 aa, Artificial Sequence; identical to SEQ ID NO: 12014
  Synthetic

SEQ ID NO: 12016 - protein, 178 aa, Artificial Sequence
  Synthetic
SEVDEVEKDIERLLEELRERVKRVTDEIRKLNKELNETDTDIVRKIRELLERLERDNKRELVREVLKRVKELADDSKRRVDKVLKDTERLIRELEKIVDEVEERVRRLVAEVLKRRKDDEEVKRRLEEVLRKVKRELDRIRDELRRVVEESETNVRDVRRHTEEVVKEVEDEVRRLEK

SEQ ID NO: 12017 - protein, 178 aa, Artificial Sequence; identical to SEQ ID NO: 12016
  Synthetic

SEQ ID NO: 12018 - protein, 178 aa, Artificial Sequence
  Synthetic
SEVEELERRIRELLRRVKRIDEEIVRRIRELNKELNRRDERIVETVRELVERVARDNKRELLDEVLKDVRRLAEESKRIVDEVLKDTERLARESKEILERVLKEVKELIEELLRRRKDLEEVKKRLEDVLRRVREEIERLKKHTDDVLRESEKNAEDVKKHTDDVVREIEERIRELKK

SEQ ID NO: 12019 - protein, 178 aa, Artificial Sequence; identical to SEQ ID NO: 12018
  Synthetic

SEQ ID NO: 12020 - protein, 178 aa, Artificial Sequence
  Synthetic
SEVEEVIKEIEKLNEDVNRIDKEIVKRIRDLNREVNERDKEIVKEIKRLVEEVRKDNKRELVDEALERVKKLAEDSKRIADDVLRRTEKLLRESKKILEDVNRTVRRLLEDLMRKRKDLEEVKDRLRKVLESSSDNVRRVTEHTDKVLEESRKNIEDVKKHTDEVVKEIEKEVRELKK

SEQ ID NO: 12021 - protein, 178 aa, Artificial Sequence; identical to SEQ ID NO: 12020
  Synthetic

SEQ ID NO: 12022 - protein, 178 aa, Artificial Sequence
  Synthetic
DEVKEVIRRAEKLNEKINDILRRVEEEIRRTLDEVRRRDEKIVKEIRDLMRELSEDNKRELVKKVLEEVERLARKSVEIIREVNKRNEDLIREVKRIADEVLKRTRDLVKDVRDKRKDDEEVKRELEEVVKESEKNIREVTDRLRKVLEESTKIVEELEEHTKRVVDEIRKRADELRR

SEQ ID NO: 12023 - protein, 178 aa, Artificial Sequence; identical to SEQ ID NO: 12022
  Synthetic

SEQ ID NO: 12024 - protein, 184 aa, Artificial Sequence
  Synthetic
SLEEEIDRVLDEIRRIIEEIKKHTTEVLEESKRNIEEVKKHTDEVNEKSRRDIEKIKREVRDKERVVELLDRVVKTSEDLARESKRILDEVLDTSRRLVEDSRRILDDVLRRVRELAEELKRVKDKEKVRKVIEEIKKIAEDVARRDKEMVDRSREINKKVNEEDKKIVEDSKRIIEDVKRKTD

SEQ ID NO: 12025 - protein, 184 aa, Artificial Sequence; identical to SEQ ID NO: 12024
  Synthetic

SEQ ID NO: 12026 - protein, 184 aa, Artificial Sequence
  Synthetic
SLEKEIKDALDRIKKDIEDSARRTKEVNDKSKEIIDRLKKHTDDVNDESRRRIKEIKDEVRDKKRVTELLEEVKERSKRLAEESKKILDEVVKKSRELAKRSKEILDEVLKRVAELAEELKRVSDKRLVKEVIDRLDEIVEDVKRRDEEIIRTSEKLLRDVARLDEEIAKRSRDLLRDVERKVK

SEQ ID NO: 12027 - protein, 184 aa, Artificial Sequence; identical to SEQ ID NO: 12026
  Synthetic

SEQ ID NO: 12028 - protein, 184 aa, Artificial Sequence
  Synthetic
SLEERLKKVLKEVDERIREIKKHTDKVNEESRDKIRKLKEELDRVNRESEEEARKIKSEVRDKERVVRTLKKAVEDSKKLIDDVKRILDEVVKRSEELVERSKRILDEVKRDVRRLIEELRRIEKDKDVRDVEEEIRKLLDEVRKLDEEMVERSKKLARTVERLVKEVIRESKEIIRKVKEETD

SEQ ID NO: 12029 - protein, 184 aa, Artificial Sequence; identical to SEQ ID NO: 12028
  Synthetic

SEQ ID NO: 12030 - protein, 184 aa, Artificial Sequence
  Synthetic
SLEEEIERVLRKVEKEIRKIKERLDEMLKEIRERIERSKRRTDKVNEDSRRRIEEIKRRVKDKKEVLERLDEVVRKSEELARRSKEILDRVLETVERLIRRVKEILDRVLDEVRKLAEELKRVDSKEDVKKVKKDIDKLLKEVREEVKEAEDRIRRIAEEVDKEDKRMIETSRRIIRKVDEDVR

SEQ ID NO: 12031 - protein, 184 aa, Artificial Sequence; identical to SEQ ID NO: 12030
  Synthetic

SEQ ID NO: 12032 - protein, 184 aa, Artificial Sequence
  Synthetic
RIEDKLRKVLEEVERIIREIRKRLEDANDDSRREIEESKEDTDRVLEEIRRRIEEIKREVRELEEVVRELDEVEKTVTKLAEDSKKRLDKVVEDSKDLVRRVEEILKEVLERVKKLIEEVKRISMDEDVERVLRKIKELLRRVEEEVERVIRESKKLLDEVRKEDEEIKKTLRDIVREVARKVK

SEQ ID NO: 12033 - protein, 184 aa, Artificial Sequence; identical to SEQ ID NO: 12032
  Synthetic

SEQ ID NO: 12034 - protein, 179 aa, Artificial Sequence
  Synthetic
SLEETVEKALKDSKDNIKRLKERVDRVLEESRRTIEELRDRARRVREEVKKRLDELRRRGLDEDELKKVEDRVDKVVRDVEKILEELIRRSEEVVREIRKLLKDVEEFSKEVVSRLRRVDKDAVKKLIDDVRKINKELNDTVEKLARDVEEINKEVARRVEKLVRELEKIDEDVTRREK

SEQ ID NO: 12035 - protein, 179 aa, Artificial Sequence; identical to SEQ ID NO: 12034
  Synthetic

SEQ ID NO: 12036 - protein, 179 aa, Artificial Sequence
  Synthetic
SLEEKVREVLKRSEDNIRKLEDESRKVLEDSERNLRKLKKEVDDAADRVRRKIKELRERGLDERELRKVERRVEDVVRRARELLDRVRKVSKEVHDRNKKLLDDLRRTSKEVADRLRRVDARIVDKLIREVEKINRDVNEKVRTSIEDLKRINEELNERVERLIREVERILKEVEDRAR

SEQ ID NO: 12037 - protein, 179 aa, Artificial Sequence; identical to SEQ ID NO: 12036
  Synthetic

SEQ ID NO: 12038 - protein, 179 aa, Artificial Sequence
  Synthetic
SLDERVERALEKSEENLRRLKKRSEEVLEEVKEAIKELKRRSREALEDVRRVLDELRKDGLDERVLEKLREDVERVHKRNEEILEEVERRVRRVHEDNKRLLDEVRDDSDKVVKRLRRVDAKVVEELIKRVEEINTRLNEKVKKSIDDVRRIIEEVRRRVEKTIRDVERIKEEVERRRR

SEQ ID NO: 12039 - protein, 179 aa, Artificial Sequence; identical to SEQ ID NO: 12038
  Synthetic

SEQ ID NO: 12040 - protein, 179 aa, Artificial Sequence
  Synthetic
RLEDEVRKMEKEVREEVKRLEDESRKVLEESRRNLDKLREESKRVLDTVRERIKDLRRRGLDERVLRELLKRVREVHERNRKLLDEVRRASEKVHEDNRRILEEVRKTVKDVVDKLRRVDAKVVKELIDRVRKILEDVEREVKKSIEEVKEINRRLNEEVKKTIEEVKEIVKEVTERAK

SEQ ID NO: 12041 - protein, 179 aa, Artificial Sequence; identical to SEQ ID NO: 12040
  Synthetic

SEQ ID NO: 12042 - protein, 179 aa, Artificial Sequence
  Synthetic
SLEDEVRDMDRKVDEALKRLRDESKKVHDDNKREIDKLRKESEDVHRENKETLDRLRERGLDERLLEEVRRRSEDLHRRNEKILREVIKVSKEIHDRNKELLDRLKERVRDVKSKLRRVDKDAVRELKRDVERIIKEVDELVKRSIEESRRITEEVARRVKETIDRSRKITKELRDRAD

SEQ ID NO: 12043 - protein, 179 aa, Artificial Sequence; identical to SEQ ID NO: 12042
  Synthetic

SEQ ID NO: 12044 - protein, 185 aa, Artificial Sequence
  Synthetic
SEIEELEERLERSTRDVEKKVRDTIRESERSTEEVARRVDESIKRLERVVEEVEERVRRIKDREEIKRLLDELRREAEEVHKTNKRLVEENNRVSEEVHRDNERLVDENDRVLEKALDDVRKRITDEEIRKRVEDVAKKVKEDTDKLRDDSRKVHERNEEESRRLEEKSERVLRRVEEILKEIER

SEQ ID NO: 12045 - protein, 185 aa, Artificial Sequence; identical to SEQ ID NO: 12044
  Synthetic

SEQ ID NO: 12046 - protein, 185 aa, Artificial Sequence
  Synthetic
SEVDRLITELRRSTKRVEEEVRRLIEDSKRSTREVAERVKESIRRVEKVVEEVKRRVDRIKDEEKIRELLRRLEEILKRAHDENEKLLEENDRVSDEVLERIEKLLKENEEVVRRVLKEVEDRITDEDIRRKIEEVVKEVKEETDRLREEAEKVVRENRKASEKLRRESEEVVERVKKKVDDTET

SEQ ID NO: 12047 - protein, 185 aa, Artificial Sequence; identical to SEQ ID NO: 12046
  Synthetic

SEQ ID NO: 12048 - protein, 185 aa, Artificial Sequence
  Synthetic
REVEEIIKELRKSTTDVAETVERLIKRSRESTKEVADRVKRLIDEVRRVVEDVERKVRRIKDREKIEKLLRELRKILREVLEEVEKLLRENEKVSRTVLKEIRRLLRENEKVVKEALDEVRKRVEDERIEKEIEDVVREMEERTKRLEKRAEEVNEENKRRSDELRKRIKKAVDEVEKRLDEIRN

SEQ ID NO: 12049 - protein, 185 aa, Artificial Sequence; identical to SEQ ID NO: 12048
  Synthetic

SEQ ID NO: 12050 - protein, 185 aa, Artificial Sequence
  Synthetic
SEVEDLIKKLEESTEEVDRRVKKLIEDSRRSTEDVDRKVKELIKDVRRVIREVEERVARIKDREKIEKLIRDLEEILRRALTEVERLLRENNRISEKVLEDVERLLRENERVVEEVLRRVEKLIKDDRIRETVERVFRKVERKTRELREEIREVDERNRRDSKRLRDEVERVARELEKKLKEIDE

SEQ ID NO: 12051 - protein, 185 aa, Artificial Sequence; identical to SEQ ID NO: 12050
  Synthetic

SEQ ID NO: 12052 - protein, 185 aa, Artificial Sequence
  Synthetic
EEVERLIRELEESTDRVAREVERLIRESRKSTEDVRRKVDKLLREVREAIKEVEERVRRTDDEREIEKLLKDLRKILEDVRREVKRLVEENNKVSEDVLREVERLLRENRRVVEEVLKRVAERVEDEEIKRKIDKVVEEVRRRTEELRERIERVNEENKEASERLERKLREMAKELDKKLKDIRR

SEQ ID NO: 12053 - protein, 185 aa, Artificial Sequence; identical to SEQ ID NO: 12052
  Synthetic

SEQ ID NO: 12054 - protein, 185 aa, Artificial Sequence
  Synthetic
KDVDELITRLEESTKRVAEEVKRLIEESRRSTERVAREVRRSIEEVKRVIREVEEKVRRIRERERIEELIRRLRKELKKVHDRNKKLLDENNKVSEDVLREIRKLLRENDEVVKEVLDRVRKRITDKDIERKIREVVEKVERDTRRLEEEAKKVNEENEKASRDLEKESKDAADTLEKKLRDIER

SEQ ID NO: 12055 - protein, 185 aa, Artificial Sequence; identical to SEQ ID NO: 12054
  Synthetic

SEQ ID NO: 12056 - protein, 185 aa, Artificial Sequence
  Synthetic
DEVEDLIRRLEESTKDVAKKVDDTIDESRKSTKDVAEAVKRSIDEVRRVVREVEERVRRIEDRKTIEELLDRLRKILEDAHRTNKRLVEENNKVSREVHETNKRLVTENEKVVRTVLREVEKKITDDRIRDEIRKVVERAKERTKELEDKSKEVNDRNRETSERLKKESEDVVREVKKELDRIRK

SEQ ID NO: 12057 - protein, 185 aa, Artificial Sequence; identical to SEQ ID NO: 12056
  Synthetic

SEQ ID NO: 12058 - protein, 185 aa, Artificial Sequence
  Synthetic
SEIDKVETEVKKLDKELEELVKRSSEKTEKLDRELEKLLRDVVREVEKLLKEIEDLVRRRKESEEVVRTAKELAERLIERLEDVLRRMKKLSEDLEDHNRRVAERIRRLSKELIDILREVLKRLDKKELAERIKKVARESEETVRRLEERLERDSERSRETLRRLAEAVRRVIEKVKEILERLRT

SEQ ID NO: 12059 - protein, 185 aa, Artificial Sequence; identical to SEQ ID NO: 12058
  Synthetic

SEQ ID NO: 12060 - protein, 179 aa, Artificial Sequence
  Synthetic
DKMEEVRRTVEKLLEDLNRLSEEVIRTSEKLLEELRRLSEEVERDTERLLKELEKMKRDGESEEKVERVLEEIERLHRETVERIRKVLKDIERLHRRVVTEAKKVVDELRKLAEEVRREGKASDEDIKRVLDEVKKILDDNREKNKRALDRVREEVKRLEDRNREVVRKVRKIVEDLRR

SEQ ID NO: 12061 - protein, 179 aa, Artificial Sequence; identical to SEQ ID NO: 12060
  Synthetic

SEQ ID NO: 12062 - protein, 183 aa, Artificial Sequence
  Synthetic
RVDERLDTVLKRVEETVRENKKKNDELLERSKENIDRLKKRLDDLLDKVRREAEKLKREVTKEEVKKIIDEVLKEIEDLLRTVKEELDRALERNREVVEETKRRIDRVLKEIEKLIRDVKRDRKEEVVKEVEERIKKLLKEVNDTSKDAERRLRETNERLNEIVKEVEKRIRELSEEVRKRVK

SEQ ID NO: 12063 - protein, 183 aa, Artificial Sequence; identical to SEQ ID NO: 12062
  Synthetic

SEQ ID NO: 12064 - protein, 183 aa, Artificial Sequence
  Synthetic
SVDERLDEVLERVKEDMDRNRRKNDESLREDEENVRRNKKETDESVKRVEERVRELKKRVKDERVKEFLDRVLEEIRKSAEEVKTIIDEVHKESEETVRRTKKIIEEVLRRIEELIRRVKKDRKEEVVKTVEEDIKRLLKEVNKVSDEAHKRNKELNERVNRVNKEAHKRNEDLLREAERKVR

SEQ ID NO: 12065 - protein, 183 aa, Artificial Sequence; identical to SEQ ID NO: 12064
  Synthetic

SEQ ID NO: 12066 - protein, 183 aa, Artificial Sequence
  Synthetic
DVKERLDKVLEEVKRDIERNKRRNDKLLKESKRIVEENKKKNEKSLEEVKRKADDLRTKVKDEEVKKIIKKVLDEIRESVERTKELADRILEENERLVRETKKILDEVLKEIRKLIEDVKKDRKKEVVEKVEREIERLREEVNRVSKKAEEDVERTNRELNRVSDEAHKTNERLLEKVERDVK

SEQ ID NO: 12067 - protein, 183 aa, Artificial Sequence; identical to SEQ ID NO: 12066
  Synthetic

SEQ ID NO: 12068 - protein, 169 aa, Artificial Sequence
  Synthetic
SSEDKARELVRTLEEALRELEREMRKVVEDSKKTLKELEERNRRLEEELEKVLERVRDEDAKRLVRKVLKESKEVLERSRELSKRADDELKRVLEEIKKRVEEVLKKVRDKPGDDRVIEELKELLERLRERVERVIKKVKDLNEELRRRNDKVAKDLKRLLKELEDRTR

SEQ ID NO: 12069 - protein, 169 aa, Artificial Sequence; identical to SEQ ID NO: 12068
  Synthetic

SEQ ID NO: 12070 - protein, 183 aa, Artificial Sequence
  Synthetic
SIEDEIRKVLTRLRRVLEEIKRSSKEVADELKRVLEEIKRSSEENNKEVEEVLKEIEKLPTDEELVRRVRKVAKEVKDHNERSTREVKKLVERLERILERSSREVEKTVRELEKELEKVLRDGGDREVREVIERLERMLEELERHNRDVERDLRRVLEEAKRHNEESLRRSKELLKKVRDEIE

SEQ ID NO: 12071 - protein, 183 aa, Artificial Sequence; identical to SEQ ID NO: 12070
  Synthetic

SEQ ID NO: 12072 - protein, 183 aa, Artificial Sequence
  Synthetic
SIEDEIRKLKEDIKRVLDKVRRDNERLKERLDKVLEDIRRSSEDNNRKLEEVLKRIRDKPVDERLVRKVEEAVKRLKEHNEDSTRRVEEVIRRLKEESEESVRKTEKVARDLERELDEVLTRGGEERVREVIEKLKETLERLKREDKEVADRAEKLLREAEEHNKRSLDESRRVLEELDEEIR

SEQ ID NO: 12073 - protein, 183 aa, Artificial Sequence; identical to SEQ ID NO: 12072
  Synthetic

SEQ ID NO: 12074 - protein, 183 aa, Artificial Sequence
  Synthetic
SIEDRVRRVLEELEEVLERIKDSSRRVVEEAEDVLRKLEEENRKLERDLERVLKEIEEEPVDETLVKEVRDLVERLKEISDESVKRSARLVEELKRRLEESSERVDRMAKELKRRLEEVLRRGGERELEEVEKRLREVLRRLEKHNEDVIRDLRRLLEEAADEDRRVIKTLRDVLRELKKRIK

SEQ ID NO: 12075 - protein, 183 aa, Artificial Sequence; identical to SEQ ID NO: 12074
  Synthetic

SEQ ID NO: 12076 - protein, 183 aa, Artificial Sequence
  Synthetic
KIEEKIRRLEEDLDRVLDEIRRNSERVTKEAEEVLERLKRENEKLKKRLEEVLEEIRRRPVDERLVEEVERAVRELKKKSDESVDRSARLVEELKKRLEESSRTVETLVRKLKEDLERVLREGGERRVDKVIEDLKRVLDEARRHNEDVVRKLKEALDKLREDDDRVRRDLEKKLRDLERRIE

SEQ ID NO: 12077 - protein, 183 aa, Artificial Sequence; identical to SEQ ID NO: 12076
  Synthetic

SEQ ID NO: 12078 - protein, 183 aa, Artificial Sequence
  Synthetic
SIREKIRELEERLEEVLRRIEENSERVLREAERVLKEIKDNSKRNNEKLERALEEIRKLPVEDELVRRVKELVERLKRHNKKSSEDVERVVRELKEELKRSSEEVKKAVDRLKEELEKVLRDGGEREVDRVIRKLEDVLRKLEEHNRRVVERLKRLLEELKKHNEDSLRKSEEVLRKLEEDAR

SEQ ID NO: 12079 - protein, 183 aa, Artificial Sequence; identical to SEQ ID NO: 12078
  Synthetic

SEQ ID NO: 12080 - protein, 183 aa, Artificial Sequence
  Synthetic
SIEERVRELMRDLERVLKEIREHSKRVIEEAKRVLEEIERNSERNNKELEEVLDEIRKRPVDETLVREVEEAVKKLKEHNKRSSDTVRDAVRKLVERLKESSDRATELVKDLKRKLEEVLRRGGEKELEEVERRLRKVLEDLRRNNKEVVDRLKEVLERLKEHNRRSLDESRKVLRELKERIR

SEQ ID NO: 12081 - protein, 183 aa, Artificial Sequence; identical to SEQ ID NO: 12080
  Synthetic

SEQ ID NO: 12082 - protein, 183 aa, Artificial Sequence
  Synthetic
SIEDRIRELEKRLEKVLREIEEHSKKVVREAEKVLREIEENSRRNNKRLEEVLDEIRKRPVDETLVREVEEAVRRLKKHNKDSSDTARKLVEELKKELKESSDRVRKVVEELKDRLRKVLEKGGEEDVRKVIRDLEDALRRLKEDNEDVVRRLKEVLKELRKHNKRSLDESEKVLRELRERIR

SEQ ID NO: 12083 - protein, 183 aa, Artificial Sequence; identical to SEQ ID NO: 12082
  Synthetic

SEQ ID NO: 12084 - protein, 183 aa, Artificial Sequence
  Synthetic
SIEDEVRKLAKDLDDVLREIEENSKRVLEKLDEMLERIREHSERVVERAKRVLDEIRKQPIDESLVRRVETVVRELKKRLRESTERVRTEVEKLKRLLEESSKEVKRVVEELKEELKDVLRRGGERELRTVIRKLKEVLDRLREHNKRVVEELEEALKELEKDNRKVVEDLERMLEELKREVN

SEQ ID NO: 12085 - protein, 183 aa, Artificial Sequence; identical to SEQ ID NO: 12084
  Synthetic

SEQ ID NO: 12086 - protein, 183 aa, Artificial Sequence
  Synthetic
SIEEEIEKVKKRLEDVLREIKKHSEEVKKKAEDVLRKIEKHSRDNNRKAEEVLKDIARLPVDERDLKRVAEVVDRLKKHNKKSTDDARKLVKELLERLDRSSETAERVVRRLKEKLDKVLKDGGEEEVRKVIEELEELLERLRRNNEEVVRDLERVLEELKRDNEKSVEDSERLLTELKREIE

SEQ ID NO: 12087 - protein, 183 aa, Artificial Sequence; identical to SEQ ID NO: 12086
  Synthetic

SEQ ID NO: 12088 - protein, 184 aa, Artificial Sequence
  Synthetic
SVKEELDDLERKVDEDVRRIRRELDEVLKESRENVKRSKDHLDEVLRRVEEAVKRLIRERGETSELAELVREVLKRVKELLRRVVEITKDVLRRSEELIRELKKELDDVRRRIKELVDRVAEDPDKEKVDRAKKEIEDLLREVRKRVEDVAREIKRLNEDVNRINDKVTREIEKLLEDVDRKVK

SEQ ID NO: 12089 - protein, 184 aa, Artificial Sequence; identical to SEQ ID NO: 12088
  Synthetic

SEQ ID NO: 12090 - protein, 184 aa, Artificial Sequence
  Synthetic
SVEDKLRELEKRVRDVHRKNEEDLDRLLRKSHEMHKRNEDELRKVLEEVRDAVRKLLKEKGETSELAEELRRVLEEVERVIREALKISEEVNRRNEELLKRLKEESRRVLEEVKRMLEKVRDKPDDEEVERVIKRIDDLLKEVHKILREVIRRIEKSLEEVHKRVRDLVREIKELLKEVDRKAK

SEQ ID NO: 12091 - protein, 184 aa, Artificial Sequence; identical to SEQ ID NO: 12090
  Synthetic

SEQ ID NO: 12092 - protein, 182 aa, Artificial Sequence
  Synthetic
SLEDKVRELERKSRENIKRNEEELRRAKRESEENIKRNEEELKRNKERSDRMIEKIRRETDDERVKKILKDLARRSEELLRRSKEILEELRELSERIVKESTDILRELLELVKEVAKRLRRVDKDVVERLREALEDANRRVNERNRELIKRLKEANKKVNEENEDLLRESEEILRRVEEEVR

SEQ ID NO: 12093 - protein, 182 aa, Artificial Sequence; identical to SEQ ID NO: 12092
  Synthetic

SEQ ID NO: 12094 - protein, 182 aa, Artificial Sequence
  Synthetic
SIEELVKDAKRRSKENADRNREKLRKVEDDSRRNIEENERRLEENEKRSREVIKELADRTDEERVRELLRRLLELSKRIADESRKILEDLLRRVKEVIRESERIIREVEEVVKEVLTRLSRVSEDVVEKLIRELEEINREVNKRNDDLIRELREINKKVNEENKRLMKESDDILKEVRERVR

SEQ ID NO: 12095 - protein, 182 aa, Artificial Sequence; identical to SEQ ID NO: 12094
  Synthetic

SEQ ID NO: 12096 - protein, 182 aa, Artificial Sequence
  Synthetic
SIEDLVRELKKKVDEVAEDLRRKVREALERSRENIDRLKKHSEENLRRSEEVVDKLRKETREEEVKDILRRVLELSKRIVEESKEILDRVLELSKKVVDDIEEIIRRVEETVKEVLTRLSRVDDKVVKKLIKEVDDILREVTKLVEKLIRELEDINRKVNERNRRLAEESRKILDEVEKRVR

SEQ ID NO: 12097 - protein, 182 aa, Artificial Sequence; identical to SEQ ID NO: 12096
  Synthetic

SEQ ID NO: 12098 - protein, 182 aa, Artificial Sequence
  Synthetic
SLDEKVEELRREVDEAIKDIKEKVKRANEESERNIRELEERVKRNLEKSKKAIEELARRVDDERVEKILREVLKRSKEIVDTIRKILEDVKRFSDKVVEEIDEILRELKRRVEEVLRRLRRVDEKVVEKLRKEVKEVLKEVEDRVRKLIREVERINEEVNRRVKELLEESEKILDDVDKRVK

SEQ ID NO: 12099 - protein, 182 aa, Artificial Sequence; identical to SEQ ID NO: 12098
  Synthetic

SEQ ID NO: 12100 - protein, 188 aa, Artificial Sequence
  Synthetic
EVEERVKELEKEVEEVLKESEDHVRKSEEDLRRALEESRKHIEDLERKLKKVLEELERKVKEEDMKREVRRALEEIDRVIKKVKRDSERLVKRVEKSIEDTRKVVEDANREVKRIVDEVKEVVRRNDKSKDLLKKLEEEIRKIITENRKLNRDLHRENERIIRDVRRENKRLADELEEIIKEVRERLK

SEQ ID NO: 12101 - protein, 188 aa, Artificial Sequence; identical to SEQ ID NO: 12100
  Synthetic

SEQ ID NO: 12102 - protein, 188 aa, Artificial Sequence
  Synthetic
SVEEKVEELEKEVRKALEDSKRHVDESEKRARDLARRSRELVRRWEEEVEKIVRELETRVKEDEMREKVKRIIKRIRDVVKKLRDLSEEVIKELERSVEESRKAVKDLNDRLREVIKEVKKVVRDKRDMEDLLRKLADEIRRILEDNRDLNRRLNEKNKEVLDRLEELNKTLADELRDIIRKLEKELE

SEQ ID NO: 12103 - protein, 188 aa, Artificial Sequence; identical to SEQ ID NO: 12102
  Synthetic

SEQ ID NO: 12104 - protein, 182 aa, Artificial Sequence
  Synthetic
KELEDVVRKIEEDLRRLEESNEKVHRENEEIIRRVDETNKKVMKEIKEMEKKVRDLVRERKEKEEVVREIEKLAREVLEKLDKVNKENEELARESVKELRRVLKENEDRVRELAKELRRVAREKNRGGEVERVIERLEKVVRDSAANVERSIRELERVVEESSKHVEDVKRELKKVVDEIRT

SEQ ID NO: 12105 - protein, 182 aa, Artificial Sequence; identical to SEQ ID NO: 12104
  Synthetic

SEQ ID NO: 12106 - protein, 182 aa, Artificial Sequence
  Synthetic
SDLDRVREEAERVVETVRRSNKEVKKKLDRELKRLRDSNKDVVDKIKRVLEKLRELIKRRKEKEEVVDTVRKLVEEVRRKLDEVLKRNRELIRRLLEELDKVNKRNKELAEEVVRKLEKVARERNVGGEIEEVRDKLRKVVEESSKHAEEVKRDLERVVEESTRNVDRVREDLKRVLDEIET

SEQ ID NO: 12107 - protein, 182 aa, Artificial Sequence; identical to SEQ ID NO: 12106
  Synthetic

SEQ ID NO: 12108 - protein, 182 aa, Artificial Sequence
  Synthetic
SLRERIEELKEELRRVLEELERRHRETEKKLEEVLKELKRRHEELVRRLRKALKEIKDKLKDKDVVRKVEKLAKELEEENKRVVETVAELIERLKDLNRRVVEEVRKLIKEIEDKLEEVKELDEEAIKDVERKVKKLLKELRDLSEKVRKESDDLLRRLRRESERVERETRKLEKELRDEVR

SEQ ID NO: 12109 - protein, 182 aa, Artificial Sequence; identical to SEQ ID NO: 12108
  Synthetic

SEQ ID NO: 12110 - protein, 179 aa, Artificial Sequence
  Synthetic
SKADEVRKKVDDINKRLRETTDRVAEETKKLIEELKKSAEEVKREVDKINKDLRKLAEDGRSEEEVKRLSERTEKLLEENNKRSEEVVRRIRELHERDLTTVRRLSEETKRLLKEVADEGKISEKDVERLTRKSEKVVREIEKKNEELKRELTEVLKDDERRNKELVEDSRRVLEEIRT

SEQ ID NO: 12111 - protein, 179 aa, Artificial Sequence; identical to SEQ ID NO: 12110
  Synthetic

SEQ ID NO: 12112 - protein, 179 aa, Artificial Sequence
  Synthetic
DKARDVARKVEELLERLRELSERVSRTSEDLNRKLKKISEDVSRTSKKLLDELRRAKEKGEDRKRVEEVVRRIDELNKRAVEIVRKLSRDTEKLNEDAVRDVRRVVEEIKKLLEDVARDGKIREEDVRRLKERVKKVMEELERRHERDKEKSRRVVEKLERDHREDLKRVKKVLEEITK

SEQ ID NO: 12113 - protein, 179 aa, Artificial Sequence; identical to SEQ ID NO: 12112
  Synthetic

SEQ ID NO: 12114 - protein, 179 aa, Artificial Sequence
  Synthetic
SKADKVEEEVKELLKRAKALSDRVSEESRRLLKELRDSARRVEEEVKRLEEELRKLKEDGKSEEEVRKVVEEIRELLTRNNKTSEEVVRRIRKLNDDAVKEVTEVVKEIEKLLREVAREGKISEEKVRRVLREVREMLKDLEKKHRDDIKRVTEVLKEDEEKNRDLMRKVDKFLEDIRK

SEQ ID NO: 12115 - protein, 179 aa, Artificial Sequence; identical to SEQ ID NO: 12114
  Synthetic

SEQ ID NO: 12116 - protein, 179 aa, Artificial Sequence
  Synthetic
SKAEEVEELVKKLLAEVKKSLDDVRRTVEKLLREVRKSLREVEETVKRLLKRLKDLKDDGQDERAVRRVVEEIKELLDRNNEDSKRVVKEIRKLLDENDKTSKRVVEEIKRLLDEVRKEGKISEEKVEKLERDVRRALERDTRENKKLEDRVETALREDKKRNDDLREDVKRVLEEIRT

SEQ ID NO: 12117 - protein, 179 aa, Artificial Sequence; identical to SEQ ID NO: 12116
  Synthetic

SEQ ID NO: 12118 - protein, 183 aa, Artificial Sequence
  Synthetic
DELEELIRRIEKLIRDSRKITDDVRKEIEKTIRESREINKEVHERNRKLLEEITEVVKRDGGEAEEVVKIVRDVLRRIKESNEEVLRLTEEVHKTNERLLREVLRVTREVLKEIKKRVERVKDRGAREEDLRRVDDRVRRVVEESEERLRRVYEESRKVVEESRKHLKEDLDRVKRTVEEIER

SEQ ID NO: 12119 - protein, 183 aa, Artificial Sequence; identical to SEQ ID NO: 12118
  Synthetic

SEQ ID NO: 12120 - protein, 183 aa, Artificial Sequence
  Synthetic
SELERVEEEIKKLIRTSREINKEVAKRIEETIKESRDINKEVVDRIRELIERLREVVKRDGGETRRVVEIADEVLKTIRDLLRRVKEITDKLHEDNERLLRRVEEVSKKVLDDIKRLIEDLRRRGVDEKELKRVEDEVRKVVEESKDHLRKVYEKSKKVVEESKEHLDRVLREVEKEIEEIRR

SEQ ID NO: 12121 - protein, 183 aa, Artificial Sequence; identical to SEQ ID NO: 12120
  Synthetic

SEQ ID NO: 12122 - protein, 183 aa, Artificial Sequence
  Synthetic
SELERVEEEIKRLIDESERINRKVVKEIEDTIRTSEEINREAHRRNRELIKRVEDVVRTKGGEDEEVVRIVRKVLEEVKKSNTDVKRVTKTVHDDNRRLLEEVKRVSEEVLKTIKRLVEDLRRKGVDEKELRRVEEEVRKVVRDSERHLDEVYKRSKEAVDRSKKHLDKDVEEIDRVVKEIER

SEQ ID NO: 12123 - protein, 183 aa, Artificial Sequence; identical to SEQ ID NO: 12122
  Synthetic

SEQ ID NO: 12124 - protein, 183 aa, Artificial Sequence
  Synthetic
RELEEVKKEIDRLIREVEEVNKDVVRKIKETIRRSREINKRVVDEIRRLIKELDDVVKTKGGESEEVVRIADEILERIKKLIEEVKEVTRRIHETNKRLLEEVKELTDEVLKTIRELVEDARRRGVDERELRKVLEKVERVVKKSRDHLDRVYEDSERVVRESEKHLDEVLERVREEIERIRK

SEQ ID NO: 12125 - protein, 183 aa, Artificial Sequence; identical to SEQ ID NO: 12124
  Synthetic

SEQ ID NO: 12126 - protein, 183 aa, Artificial Sequence
  Synthetic
RELEEAEKTIEKLIKESRDINEKVARDIDKTIREIREEMKRVEEEIRDLIRRIREVVKRDGGESERVVREVRRILEEIKKLLEELEKRVEEIHERNKRLLDTVLRVSEKVVEDIRRLVEEVRRRGADERKLREVTKRVDKVLEESRRHLEEVYRKSKEVVDEIRKRLREVLKRVREDVERIER

SEQ ID NO: 12127 - protein, 183 aa, Artificial Sequence; identical to SEQ ID NO: 12126
  Synthetic

SEQ ID NO: 12128 - protein, 183 aa, Artificial Sequence
  Synthetic
SELDEVAKRIKELIKESRRINEEVERRIKKTIDEVRKINKEAAKTVDDLIKTIRDVVRRKGGETKEVREIVDEILERIRELVKEVKRFTDEVHERNRELLRRVVEVSEEILRRIEKLLREARERGVDEKKLRDLEEEVRRVVEESKDHLRKVYERSRKVVEESRKHLDEVLTRVDKVVKDIRT

SEQ ID NO: 12129 - protein, 183 aa, Artificial Sequence; identical to SEQ ID NO: 12128
  Synthetic

SEQ ID NO: 12130 - protein, 185 aa, Artificial Sequence
  Synthetic
SELEEAEKKIERLIEEVRKMNKTVHEENERLIEDLRRVVKEAHERNKRLIEELEDVVRKISDKETVTRIVEEVVRRVRKTVEDVRRIVDEVLKKVKDTVDRVKRITDEMLRKVKELVDDVRRKVDDKDVEKKLKDVLDKVRKVVEESRRHLEESLDKVRRVAEEIRKRLKESKDRVDEAAKEIRR

SEQ ID NO: 12131 - protein, 185 aa, Artificial Sequence; identical to SEQ ID NO: 12130
  Synthetic

SEQ ID NO: 12132 - protein, 185 aa, Artificial Sequence
  Synthetic
DELEEAEKRIKELIDRLEEFNEEVHRRNEKLIRELREVLKRVEEEIRRLIKELRDEVRKISDKDTVEDIVRKVLETVKELIKEVKKIVDDVLREVRKTVRKVKEITDDMLRRVRKLIEEVRKRTRDKRVEERLERVLREVEEVVKRSRKHLEDSLREVEKAVKEIRDRLDEVLRRVEKAVEEIRT

SEQ ID NO: 12133 - protein, 185 aa, Artificial Sequence; identical to SEQ ID NO: 12132
  Synthetic

SEQ ID NO: 12134 - protein, 185 aa, Artificial Sequence
  Synthetic
SELEDAERKVKELIDRLREVNRKVHEDNKRLIDELRDVNRKVAEEVRRLIEELKEVARRVDDKETVVRIVDEVLKRVEELIEKVKRISDRVLEEVKRTVDEVKRITDKVLEDVKRLIDDVKRKTRDKRVRDRLKEVEDRVRKVVEDSRRHLEKSLREVEEVIRESREHLEEVLRRVKEEADKIRK

SEQ ID NO: 12135 - protein, 185 aa, Artificial Sequence; identical to SEQ ID NO: 12134
  Synthetic

SEQ ID NO: 12136 - protein, 185 aa, Artificial Sequence
  Synthetic
SELEKVREDIKRLIEDLRRANDRVRRESERLNRELREVNKRVHDDNRRLIEELRRLVKDIKDKETVRRIVDEVLKEVRKTVETVKRISKEVLERSRKLIEEVKEITKRALEEVEELVRDVERKTRDERVRDELRKLLRTVEKVVEESKKHLKEVLDRSREVVEESKTHLEKSLTDVEKVVREIRT

SEQ ID NO: 12137 - protein, 185 aa, Artificial Sequence; identical to SEQ ID NO: 12136
  Synthetic

SEQ ID NO: 12138 - protein, 185 aa, Artificial Sequence
  Synthetic
STLDEAVKRIDELIKRLREVNEEVARRSKRLNDELKKVNEDVARKIEELIRRLRDVVRKISDKETVDRIVDKALEDVKKLIEDVKRISDKVLEDSKRLIEEVKRITDRVLEEVERLIREVKKETRDKRVEEELERVLRKVEKVVKESRDHLEEVLRRSEDMARRSREHLEELLKRVEKVVREIRT

SEQ ID NO: 12139 - protein, 185 aa, Artificial Sequence; identical to SEQ ID NO: 12138
  Synthetic

SEQ ID NO: 12140 - protein, 185 aa, Artificial Sequence
  Synthetic
SELEEAIRRIEKLIRELREVNKRVAEEVKKSNEESKEVNKRVKDDVKELIERLRDIVKKVKDKDTVEEIVKEVLKRVKELIDEVRRISDEDLKTSKRLIDEVKRITDEMLERVRRLVEDVRRKTRDKDVEDKLREVLRRVEKVAEESRRHLEKVARESEEVVKRSRKHLEEVEREVKKVIDEIRK

SEQ ID NO: 12141 - protein, 185 aa, Artificial Sequence; identical to SEQ ID NO: 12140
  Synthetic

SEQ ID NO: 12142 - protein, 185 aa, Artificial Sequence
  Synthetic
RTLEEVEKEVEKLIEDLRRVNREVAERIKKSNEDSKRVVERVEDEIRRLIEELKDMVRKVSDKETVVRIVDEALERVEELIRRVKKIVDDDLRRSKELIDRVKEITDRMLETVKRLIDEVRAETRDERVDKRLRDVLRKVKKVAEESRKHLEELAERSKEVVERIRRRLEEVLKRVREEAEKIRK

SEQ ID NO: 12143 - protein, 185 aa, Artificial Sequence; identical to SEQ ID NO: 12142
  Synthetic

SEQ ID NO: 12144 - protein, 185 aa, Artificial Sequence
  Synthetic
SELEDAERRIERLIRELRKANEEVARRIEKSNEDSRRVNKKVAEEIERLIKELRDVTKDVDDKETVKRIVDEMLERVKKLITEVKEISDRDLEESRKLIREVEKISEDVLDTVRKLVEDVRRKTRDKRVEEELKRVLDEVKRVIEESKERLKKWLRDSERVVEESRRHLEELRKRVEKAVREIRT

SEQ ID NO: 12145 - protein, 185 aa, Artificial Sequence; identical to SEQ ID NO: 12144
  Synthetic

SEQ ID NO: 12146 - protein, 184 aa, Artificial Sequence
  Synthetic
RVEDEVRKMREKSEKVDREIREAVRRSLTRIKEVVDEIRDEVRRSEDKVKKEIDRLRKEGADEKALKELLDRVKRSVEEVERVVEEVLRRVEESARDVERVVTENHRISKELVEDVRRKVSREEVDKLLDEVRREADESNTRLRERVKEVNKRNEEVIEELRKRVEEVHRTNEDLIRELRKKTT

SEQ ID NO: 12147 - protein, 184 aa, Artificial Sequence; identical to SEQ ID NO: 12146
  Synthetic

SEQ ID NO: 12148 - protein, 178 aa, Artificial Sequence
  Synthetic
REEEELERVKRRSEKVDEEIKKRLREVAEEVKRSNEEVKKRLEEVLRDSKRKLDELREEGADEKAVEENERTVRTVARRVEKVVRENEKTLREAERAVEEVLDRNRKTVEDVERLLKRREKDVRELIRELEESNKRVKDVLRKLIEEVKKSDDELREIVKRLVEEVERSNKELEDRVR

SEQ ID NO: 12149 - protein, 178 aa, Artificial Sequence; identical to SEQ ID NO: 12148
  Synthetic

SEQ ID NO: 12150 - protein, 178 aa, Artificial Sequence
  Synthetic
REEERLKKLKEDSDRVDREIERKAEKVLEESEEVDRDIERKLREVERKSREVLEELKKRGADKDAVKRNEETVRRVVEEVRKVLDENTRSVEKVLEEAKRVVEENKKTVDRVDKVVRRRDKDLEELRKEVEKSNTDLEKIIEDLIRRLKKSNEDVRRTVTELVKEVDRSNKKLEDEVR

SEQ ID NO: 12151 - protein, 178 aa, Artificial Sequence; identical to SEQ ID NO: 12150
  Synthetic

SEQ ID NO: 12152 - protein, 178 aa, Artificial Sequence
  Synthetic
REEEELEKLRERSERVDDEIRKRLREALERSREVDEELRRRAEESKKESDEVIKDLARRGADRKALEENRETVRESLERMRRVVDENTKSVEDVFKAVEDVLRRNKRTVDEVRKVVERREKDLDELRREVEKSNEDVRRFLEKLVRDLEESNRRVRERIKRLHEENKKSNDELRKRTK

SEQ ID NO: 12153 - protein, 178 aa, Artificial Sequence; identical to SEQ ID NO: 12152
  Synthetic

SEQ ID NO: 12154 - protein, 181 aa, Artificial Sequence
  Synthetic
SELEELKKKSKKLNDDIERVVEEVLKRSEDINERVKKEVKDVIDRNTDVLRRVKRDVEREDKSRELIRRLIEEIKKTTKELEDRVRELVKESEESVRRIEKLIRELIKESEKVVEEVKRTVSKGKEEAVRKVEKENRESVEKLKKAVKEVRDRNRKVIEELKDLVRRSRDKSKKVVDELRK

SEQ ID NO: 12155 - protein, 181 aa, Artificial Sequence; identical to SEQ ID NO: 12154
  Synthetic

SEQ ID NO: 12156 - protein, 181 aa, Artificial Sequence
  Synthetic
REVDKARKDVDDILKRVTEAVDRMDRDNERVLREVEETIRKLEEDSRRINKDIEDAVRKEDKSRELIKKLIEESKRSVDELRKVITRLERRIERTTKELKKLVEKLIRELKKVVEDAIRKVSKGSRKDVEDVRRKVEEVVRRMEKRLRESEKKSRDVVRKLRKVIEDVERDNDRVVKELEK

SEQ ID NO: 12157 - protein, 181 aa, Artificial Sequence; identical to SEQ ID NO: 12156
  Synthetic

SEQ ID NO: 12158 - protein, 181 aa, Artificial Sequence
  Synthetic
SELEEMRRRIERLAEEVRTTVEEVVRRSEELNKEVEKAVRKVVDENRRVLEEVKEEVRKEKDSRELIERLIRRIEETTKKLEDLVRKLVKELRDSVEEIRKLIEDLIRRLKKVVREAKETVSKGKKEEVKRVEERVERVVEELRRLVEEVRKRNEDSIEKLKDLVRRSKEESERVVKELED

SEQ ID NO: 12159 - protein, 181 aa, Artificial Sequence; identical to SEQ ID NO: 12158
  Synthetic

SEQ ID NO: 12160 - protein, 181 aa, Artificial Sequence
  Synthetic
SDLERVRKESEDLNRRIKTEVRRVLEELKELLKRIKEEVEELVRRNEEVLKRVREEVTKRREARELIRDLIKKIRDTTEELRRVVERLVEEIKKVLRDLKKLIEDLIRESKKVVREILERVSKGKEEAVRKVKEDNDRSVEELKELVKDVERKLREAIKELEDLIRRSEEKSREVVERLRR

SEQ ID NO: 12161 - protein, 181 aa, Artificial Sequence; identical to SEQ ID NO: 12160
  Synthetic

SEQ ID NO: 12162 - protein, 183 aa, Artificial Sequence
  Synthetic
SLEEEVRRVKKELRRVLEKSTKLIEEVTRELETVLRESRDRVRRAKEELKEAVREVRRDVGEGEKLRDAERVVEDLLRELDDSLRKTEEMVKELKKKLDKSNKTTADLVRELLKRLDKVLKDGGEEEVRKVVEDVERVLRELEKHDRDVAEEVRRVLDELRKHDEDVRRKLRKVLEELKEKIK

SEQ ID NO: 12163 - protein, 183 aa, Artificial Sequence; identical to SEQ ID NO: 12162
  Synthetic

SEQ ID NO: 12164 - protein, 183 aa, Artificial Sequence
  Synthetic
SIEDRVRRVEKELREVERKSTETVKRVEEELEEVVRRSRELVERVKERLKKMVEEVKRDTGEGEKLKRAEEMVRRLLRELEESNKKTKTLVDRLLEELRDSNKKTRDLVRELLKKARDVLRRGGEKELEDVERDVRRVLKEAEDNDRRVVERVRRVLKEAEKHDRDVVRRVDEVLKRLKEEIR

SEQ ID NO: 12165 - protein, 183 aa, Artificial Sequence; identical to SEQ ID NO: 12164
  Synthetic

SEQ ID NO: 12166 - protein, 183 aa, Artificial Sequence
  Synthetic
SIEEAVERVAKRLEEALRRSTEEVKRVKEETRESVERSRREVEKVEKELREVVERVRRERGEGEDLKRAEDVVRELLKLLRESLKRSEELARDSVRKLDKSNTDTERLVRELLKRARDVLREGGDDRLRKVVEELETVLDELRKNDRRVIEEVRRINDELRRRDEEVIKRVRDMLKKLTEEIK

SEQ ID NO: 12167 - protein, 183 aa, Artificial Sequence; identical to SEQ ID NO: 12166
  Synthetic

SEQ ID NO: 12168 - protein, 179 aa, Artificial Sequence
  Synthetic
SLEDKLRENKRRSEAVVEEAERRLRKNEEDSRKVVRELEDKLRRLREESKEMADRLRRKGADERVVRKVNKDSEDIIRELERLVREVERVSEELIRRIEEIVTRVLRVSEEILRRLKRVDDKVVEKLLKESKEILDRARETVKRILDDSERILRELRRRVEKLIKESRDILRKVDEDER

SEQ ID NO: 12169 - protein, 179 aa, Artificial Sequence; identical to SEQ ID NO: 12168
  Synthetic

SEQ ID NO: 12170 - protein, 181 aa, Artificial Sequence
  Synthetic
KAEEILEDIKRAVEEALRKLEESVRRNKERIREAVERLRETVKEAKERVDEVKRELEEKGVDRSLIRRVEEVVKRVLDINRRLIEEVEDVVKKSEEINADLIREVRTVVTDVERIIRENGELEEVLRKVREDLERIIRRVEEESKKSHKDSEDVLRRVEERSKKSLEELEDIIKKVKEEAD

SEQ ID NO: 12171 - protein, 181 aa, Artificial Sequence; identical to SEQ ID NO: 12170
  Synthetic

SEQ ID NO: 12172 - protein, 181 aa, Artificial Sequence
  Synthetic
DMEKIVRDVEDRVREVEDRLRRIAERNKREIERVVEELKKTVKEIEDKVREVVKRLEEKGIDESLRERVEKVVRDVVRENEELIKEVEDAVRESLKIVKDLIDEVRRVVAEVERIIRENGELEEVLRKVVTDLERILRRVLEDAKRVHEESKRRLDDVRRRSEDSVRRLEEELKRVEEEVD

SEQ ID NO: 12173 - protein, 181 aa, Artificial Sequence; identical to SEQ ID NO: 12172
  Synthetic

SEQ ID NO: 12174 - protein, 181 aa, Artificial Sequence
  Synthetic
DAEKILEDIKREVDEVLKRLRDIIRRNEEEIRRAVEDLKRIADEDREAIKRVIDELRKKGVPEELLKEVKDVVDESLRRIEKLIEDVKRAVAESVRRAEKLIRDVERVVKRVEDIIRKNGEAEEALRKVVEELRKILRDVTEVAKKVHRDSEEVLKKVREDVRKVHEDSKRVLDKVDKDAN

SEQ ID NO: 12175 - protein, 181 aa, Artificial Sequence; identical to SEQ ID NO: 12174
  Synthetic

SEQ ID NO: 12176 - protein, 176 aa, Artificial Sequence
  Synthetic
SRLEEVLRRHEELNERVERTVKKVHDDSKELIDRIRKDVEKVVRELEKVIDEVEKNSRDKDLVREMIKRIEDVLRRLEDRVRKLAEKIDRVLEESRRLVEELAKRSRESLKRLVDTIGKESEKVEEIERHARKVERRLEEIVDRNRKSVDKAKKELEKIVRDVRRRVEEVVDRLRK

SEQ ID NO: 12177 - protein, 176 aa, Artificial Sequence; identical to SEQ ID NO: 12176
  Synthetic

SEQ ID NO: 12178 - protein, 176 aa, Artificial Sequence
  Synthetic
DEVRRVLEELRRLLDEVRERVRRVVEEHKRLNDRIRREVERAHEENKRVDDDLRRKVRTRELVKEVIERSKEVLERTEKLVRDLARDSDRSVEEARKRVEELMREIDDVLEKLVRTIGKDSKDVKEVKKEVERVKEELRRLVEELRKHAEKVKEELKRIVDRDRETNERTVEELKK

SEQ ID NO: 12179 - protein, 176 aa, Artificial Sequence; identical to SEQ ID NO: 12178
  Synthetic

SEQ ID NO: 12180 - protein, 176 aa, Artificial Sequence
  Synthetic
SEAEDVLRKLERLLEEVRERVADAHRRSKELLDRVDKEVKRVNEENRKLDDDIRKKVRDKDLVRKAIEDSKTVLEKTKRLVEDLMRKIDRVLEESAKVVEKLREEIEKVLRELLETVGEDNDEARKVREKVKKVEEELRRIVEEDRKEVEKVKRKLEKDVREDEKENRKTVRELEQ

SEQ ID NO: 12181 - protein, 176 aa, Artificial Sequence; identical to SEQ ID NO: 12180
  Synthetic

SEQ ID NO: 12182 - protein, 185 aa, Artificial Sequence
  Synthetic
TLEELLEEIRRKVEEVLKKLEDLLRRDHEEVKKVEEELEEINKRSEDRVRKAVRRLERDAKDDKETVKRVKKKLEEVVRKDHDVVRDIKRRLKESNDKSERVMREIKKRLKEVLDEVKKVVDDGVGEEAIRKVLRKLEEEAKRLEKRIEEVLKESKDRIDELRKRIEESHKDLERIIEELERRIK

SEQ ID NO: 12183 - protein, 185 aa, Artificial Sequence; identical to SEQ ID NO: 12182
  Synthetic

SEQ ID NO: 12184 - protein, 185 aa, Artificial Sequence
  Synthetic
RLEELLERIRKRVEEVKRESERLLKEDHDRVEEAKKRSEDINRRSKEEVDRMLRELETKAKDDEKVVREVKELLKRVVEKDHDLSRRSVELLDTSNKKSKDLSEESKKELDEAVKEVETIVRNNVGEEAIRRVLKKLEEIAKRLLDENRRVLEESKKIIDKLEEDNRRSHRELKRILDELRKRIK

SEQ ID NO: 12185 - protein, 185 aa, Artificial Sequence; identical to SEQ ID NO: 12184
  Synthetic

SEQ ID NO: 12186 - protein, 181 aa, Artificial Sequence
  Synthetic
KEAEDLEKKVEDILRRVRELLEELHRRSEKILKDVKDRSRDLLRRVREILKRVEEKKERVREDELDKILKEVTERVKRVLEESEELLRRVEKVVKDINKRAEEILERVRKVVEDVLDDMRKKGVDERLVREVEKKLRTVEEEVRRIVKENKERLDEAREDVKRSNKTIRDELERARERIET

SEQ ID NO: 12187 - protein, 181 aa, Artificial Sequence; identical to SEQ ID NO: 12186
  Synthetic

SEQ ID NO: 12188 - protein, 181 aa, Artificial Sequence
  Synthetic
SEAEDLTRRVREILKRVEDLSKKLNDDTKKILDELRELSKRLMEEVKKILRRVEEKKERVSEDELRRILEDVRRRVEEVVKTSERLLRRVEKASKDSVETSRRLLERLREFVRRVLEEARRRGVDKRLVDTVREELERVRKKVEDSDRRNEEELRKVKEEARRSNERIRELLKTVEDRIRT

SEQ ID NO: 12189 - protein, 181 aa, Artificial Sequence; identical to SEQ ID NO: 12188
  Synthetic

SEQ ID NO: 12190 - protein, 181 aa, Artificial Sequence
  Synthetic
DEVRKLVREVEDILRRVREKSERLVRLVEEILRRVLEESRRLLEETREILERVEEKKERVSEKELKEILEEVARVSEKTVRDSERLLDDVRRKVEEVLERSRRLLDEVRKTVEKVLEDARRRGVDERLVREVKELLDRVADEVRKSDEDIRRLLEDAARKVEESNKRNRDLLETVRRRIEK

SEQ ID NO: 12191 - protein, 181 aa, Artificial Sequence; identical to SEQ ID NO: 12190
  Synthetic

SEQ ID NO: 12192 - protein, 178 aa, Artificial Sequence
  Synthetic
SEVEKLKKEVKESSKEVIKEVEKLHRESEKSSEDVKREVEKLHRRSKEVADEVRERVRRRKDKEVIDKLADDLRRIAEETIDRVKKLVDEDREVVKDTIRRLRELADEDRRRVEDVIRKIRDERVVEEIERDVRESLRRIEEIIRRNEKRVRESLEDLKRILRENKETVRKVVDELRK

SEQ ID NO: 12193 - protein, 178 aa, Artificial Sequence; identical to SEQ ID NO: 12192
  Synthetic

SEQ ID NO: 12194 - protein, 178 aa, Artificial Sequence
  Synthetic
SEVDDLTRRVRDVLRRVEEKVRDLHRRSEKVARDVEREVEELHERSKDVARKVEEKVRRIERREDIKKLAEDLKRIVDESIKRIEELAKRLEKIVRETIKKVRELVEEVKRIVDDVIRKIRDKDVVDRIRREVEEMLRRLEDILRRNEDTVRRVKEKLKRIVKRDEEEVRKVLDRLRK

SEQ ID NO: 12195 - protein, 178 aa, Artificial Sequence; identical to SEQ ID NO: 12194
  Synthetic

SEQ ID NO: 12196 - protein, 178 aa, Artificial Sequence
  Synthetic
SEVEELKKRVEDVAEEVKDRVRKLHEKSERSSREVEKEVRKLHEESRRVAREVTERVRRIDDRDTIRELVERLKDIFRKSIEDIKRLVEEDKRRVDETIKEIKRLVDELRERVTRVIEKIRDEEVVKEIRDTVEKVLEEARKIIEDNRKRVAESVETLKDIIRRDEKTMRDVVDELRT

SEQ ID NO: 12197 - protein, 178 aa, Artificial Sequence; identical to SEQ ID NO: 12196
  Synthetic

SEQ ID NO: 12198 - protein, 178 aa, Artificial Sequence
  Synthetic
DEVEELRREVEESSRRVEKEARRLHKRSEESSREVEERLKRLHDDSRRVAREVEEIVARSEDRRVIEDVVRRLEEEVKRSIETMEELVKRDRDVVRKTIEDMERLAREDRKIIERVIKEIQDEDKVRDIKRRIDESKRKIEEIIKRDKEEAEKSEEKIKEIIERDRETVERVVRKLRE

SEQ ID NO: 12199 - protein, 178 aa, Artificial Sequence; identical to SEQ ID NO: 12198
  Synthetic

SEQ ID NO: 12200 - protein, 182 aa, Artificial Sequence
  Synthetic
EIEEIEEELKDRVRRSEEKLRRIEKELRELVEKSRKELEDLLDKDRRDMKRVADELRRDDGPDVEEALRRITEVTRKSEEEVTRLVEENKRVVEDIRRLLRELAKENKDVVREIRDLLKKVDDRRVVEELTRKLEESIKKSEDEVKKVKERLEESIRRSKERLEDARRESERVLTEIRERLR

SEQ ID NO: 12201 - protein, 182 aa, Artificial Sequence; identical to SEQ ID NO: 12200
  Synthetic

SEQ ID NO: 12202 - protein, 182 aa, Artificial Sequence
  Synthetic
EVERILDELRRRVEEVVKENEKALDTLRKESERTEEENKRLLDEAREKVDRVVKELKRDDGPDVEELLREIRTVLEDVKRRVEKSTREDKEVVKDVERLVRESSKDIRRVLKEVEEELRKTRDEKVLRDLAKKLEDVIRKSEELTKELAKRLRESSKRSIDLTRELLKRLEEVLKKVRDALR

SEQ ID NO: 12203 - protein, 182 aa, Artificial Sequence; identical to SEQ ID NO: 12202
  Synthetic

SEQ ID NO: 12204 - protein, 182 aa, Artificial Sequence
  Synthetic
SVEEIVEEIRRRSKETEDRNRRVVEELEERVRRVLEELKKIVEDARRKVEKVARELKRDDGPDVDELLKEIRDVLERVVTEVEKLLERIKKVLREIAERIKRSSERDREVVERVEKRLREVRDEKVVEELLRRLKETSDDSLRRTDELRKELERVLKEVRERLKELDRELKRVLDDVREKIR

SEQ ID NO: 12205 - protein, 182 aa, Artificial Sequence; identical to SEQ ID NO: 12204
  Synthetic

SEQ ID NO: 12206 - protein, 183 aa, Artificial Sequence
  Synthetic
KLEDILRKIEKELKEVKEKSERIVREIEKRHEDDKRRVEDIVRRIKEEVERVVKEIKEAPVPEEVIRDLIRLLEEVLREVDEVLKRVRDLNRRVVEEVRKVSEENEKLLRELLRRVREVLRANRDEVMKKVEKEVRDVIKELEDTAREVEKKSEKVLKETNDLAKEVMDKVRKVAEDLRKKLE

SEQ ID NO: 12207 - protein, 183 aa, Artificial Sequence; identical to SEQ ID NO: 12206
  Synthetic

SEQ ID NO: 12208 - protein, 183 aa, Artificial Sequence
  Synthetic
ELEEIVRRIEEEVRRADKEVKEILTEIEKEHRRDVERSDRSLEKIKRDVDRALEEVERVPVDEKVIRRIEKLLRDVLEKVKRVSERVKELNTRAVDLVRRVVEEISELLKRVLDRVRDILKANRREVMKKVTEEVREVLDRLRELLKEVAKRSEEVIKRTNELNETVMRDVERVLRELREELR

SEQ ID NO: 12209 - protein, 183 aa, Artificial Sequence; identical to SEQ ID NO: 12208
  Synthetic

SEQ ID NO: 12210 - protein, 174 aa, Artificial Sequence
  Synthetic
SEVEKLEEDFREMIERSERTLEKLKKENEDASKKSKEKLEKLLREMKEIIDRIRDLIRKGRDITELLRRLEELLERIEEELKESIRESRKLLEDIERISRDSIRRLRELLEKAERDGADEEVIKKLRELLERLEREHRKVIEELKKSNKKNEEDIRRVLEELRRLVKKLADDAR

SEQ ID NO: 12211 - protein, 174 aa, Artificial Sequence; identical to SEQ ID NO: 12210
  Synthetic

SEQ ID NO: 12212 - protein, 174 aa, Artificial Sequence
  Synthetic
REAEELLKEMKRASEKSEKIIEDLRRENEKLSKESEDIIRKLKEDNERMIRTIEELIRAGRDIDKLKKESEKLLKEIADELERSIRESRRLLEEIEKILRKSIKELRDLLEEIERRGLEEEVIKELRELLERNEREIKKVLDELRRSNEKNERDIERALEELKRTNDELAKRAK

SEQ ID NO: 12213 - protein, 174 aa, Artificial Sequence; identical to SEQ ID NO: 12212
  Synthetic

SEQ ID NO: 12214 - protein, 174 aa, Artificial Sequence
  Synthetic
DEVEKLRREIEEIIKEWEKRTRDLKREMKKISDDSRRRIEELLRDFKRIIDELRKAIEDGRDVTDLLRELRRLLEEIERRLEESIRRLKELLDRIHEEDKRLRKELEDLLKRVEDDGLSKEVIERLRELVKRVTDKVRKVNEELRKLLEDNADEIRRAIERLRELLRRLEEEAR

SEQ ID NO: 12215 - protein, 174 aa, Artificial Sequence; identical to SEQ ID NO: 12214
  Synthetic

SEQ ID NO: 12216 - protein, 174 aa, Artificial Sequence
  Synthetic
SEVEKLVREAEKIIEDIRRVIEELLRRARKINKEWDDVSRKLKEDAKRIIDTVLKLIREGRDITELAKRLDELLREIKKINDEMLKRDRDLVDEIRRRLERLLEELRRLLEKIRADGLDKDVIERLRDLVRRVKEDIERVLDEWRKSSEEAEERSRRVIEELRRLLEELKERVR

SEQ ID NO: 12217 - protein, 174 aa, Artificial Sequence; identical to SEQ ID NO: 12216
  Synthetic

SEQ ID NO: 12218 - protein, 182 aa, Artificial Sequence
  Synthetic
SELEELKKTMDEVNKETKKENDRLLDEARKVNEESRRRLEKLRKELDDVVREVEDARRRNTDKDELLRKLREILDRVRRDVERIVKRNKEILKRVEEDLRRLNEENRRILKELEDRARKNNVRSDKVERVLRELRKSSRKVHEDSKKVVEDLERSSRTVEKELRDALKELEDKVREVEKKLK

SEQ ID NO: 12219 - protein, 182 aa, Artificial Sequence; identical to SEQ ID NO: 12218
  Synthetic

SEQ ID NO: 12220 - protein, 182 aa, Artificial Sequence
  Synthetic
DELEKLLEEARKVNEETKEANERLLREMEKVNKESEDANRKLLEELKEVVDRVDDLARRNSDRDDLLRRLEEILEDLRRKAEELNRRNKRILEEVEKRLEDLNRENERILREVEERLKKANLSSEDVKRVVDELRESSREVHRRSREVVERLRRSSEEVHKKSRDVLRELTRLVREVKERLR

SEQ ID NO: 12221 - protein, 182 aa, Artificial Sequence; identical to SEQ ID NO: 12220
  Synthetic

SEQ ID NO: 12222 - protein, 182 aa, Artificial Sequence
  Synthetic
DELETLLRELERVNKETERELERLKREAEEVNKATRKDLDELRKEIDKVVKEVEEARRRNKDKDDLLRRLRDILRRVTEKLRKLIEDNERITEKIVRELKRLVRENEEILREVKKRLDEANLESERVKKVVDELRDSSRRVKEKLEDVVRRLRDLSRRTKEEVEKVEEDLRRKVREVEERLR

SEQ ID NO: 12223 - protein, 182 aa, Artificial Sequence; identical to SEQ ID NO: 12222
  Synthetic

SEQ ID NO: 12224 - protein, 182 aa, Artificial Sequence
  Synthetic
DELETLLDEAKKVNEETRRANRELRERVREVNKRTEEELKKLRDRLEKVVDDVDKLRKRNTDTEELLRRLREILKRIEEELEELKERNRRITTRVEEELERLNRENEEITRRLTERLRRANLESRRVREVEERLKKLSEDTHRDSRRLVEEMRRLSKETEKKVEDVVRDLRRLVKEVEERVK

SEQ ID NO: 12225 - protein, 182 aa, Artificial Sequence; identical to SEQ ID NO: 12224
  Synthetic

SEQ ID NO: 12226 - protein, 182 aa, Artificial Sequence
  Synthetic
DELEKLRRELEEANRRTKKANEEILREAERVDERSEEELRKILETLKKVVKDVDDMARRNSDKDELLKRLREILKELEDRLRDIVRRNREITKDLVERLKELNRRNEEITRRLTEDLRRANLEDRRVRTVVEELKKLSRETHEDSKRVVEELERLSRESERKLREVVKEMRKLVKDVEDKVK

SEQ ID NO: 12227 - protein, 182 aa, Artificial Sequence; identical to SEQ ID NO: 12226
  Synthetic

SEQ ID NO: 12228 - protein, 182 aa, Artificial Sequence
  Synthetic
DELEELLRRVEEVDKESKRRLDEIKRRMKEVNDRTREALRDLLRRLAEVVKRVLDLIRRGSDKDRLLEDLRRILREVKEAAKELLKRNREITEKMVRDLKRIVKDNKKILDDVEKTLREANLESERVKKVVDDARDSSRKTVERLETVVRDLKRSSDDVEREVRELLKELERLVKKVEDDAK

SEQ ID NO: 12229 - protein, 182 aa, Artificial Sequence; identical to SEQ ID NO: 12228
  Synthetic

SEQ ID NO: 12230 - protein, 183 aa, Artificial Sequence
  Synthetic
RELEELLRKVRKLVEEIERELKKLLEEDRRLSEESREELRKLLEDARRMIREIEELLKRRRTEEVSTTIDKILKEVEKKVKDLERRSKKISEDSRRKAERVLREIKRILEEIEKDVERVLRERDSEDAKRVLKEIRRLAEELKKSVKRVIEEVEDSNRRNEEEVRRVLEEIRRLLEDLDRKVK

SEQ ID NO: 12231 - protein, 183 aa, Artificial Sequence; identical to SEQ ID NO: 12230
  Synthetic

SEQ ID NO: 12232 - protein, 183 aa, Artificial Sequence
  Synthetic
SELEELLKDAKRVIDTSRRLITELEKRDEEIIRRIKDLLRRVTEEAKRMLDEIREELKRRRDEEVKKRIKELMDKIREDLKRVLEEIDKLSRDSEEDVRRVLDENRKLVEEVERKVREVLRRRDSEKAKRVLEEIRKLLEDSKKESEDVARKLKKSNDELRRDVERVLREIEKRLEDLKREVE

SEQ ID NO: 12233 - protein, 183 aa, Artificial Sequence; identical to SEQ ID NO: 12232
  Synthetic

SEQ ID NO: 12234 - protein, 183 aa, Artificial Sequence
  Synthetic
SELEKLLREVEKIIRDSDDLLRRLEKRNRDLIRTSEKLLKEVKDDVDRVIRELERLLEEERSEEVARRIEELMREVEEKAKRLLKENEDISRRSREDVRRVLETNKRLLDEIRRRVKDVLDRRKSEKAEDVLRRIEKLLDDSRRRSEKVAKELEESNERSKRKTEKVLKEIKEALDRVREKVK

SEQ ID NO: 12235 - protein, 183 aa, Artificial Sequence; identical to SEQ ID NO: 12234
  Synthetic

SEQ ID NO: 12236 - protein, 179 aa, Artificial Sequence
  Synthetic
SEIEKVARDVEELLKKVEKKNRDMVERVRRLLEKVKRENEELVRRVEESNERLKERVDRSNRDERIRRDVERIVKESEDLLKESHDIVKKIIEEVDELLKESHKRVREIIERIKEMVKDGGERVEELEKTVRKLARDAEKISEDVERRVRELARRLRKISEEVLRRNKELVRRVDEEIR

SEQ ID NO: 12237 - protein, 179 aa, Artificial Sequence; identical to SEQ ID NO: 12236
  Synthetic

SEQ ID NO: 12238 - protein, 179 aa, Artificial Sequence
  Synthetic
SEVEEAVERVKKLLEKVRKDNEEFRERVRKSNEEAEERNRRVVEEVRRSNEELKEKVERSNRDERIKEKVKRIVETSEKLLRESHKTAKDIIRETEELLERSHEIVREIIERVKKLLDEGGEDVEDLKRRVKELADEARRISEKVLRDNKRLLTELDKISERVLRENEKLVREVEETIR

SEQ ID NO: 12239 - protein, 179 aa, Artificial Sequence; identical to SEQ ID NO: 12238
  Synthetic

SEQ ID NO: 12240 - protein, 179 aa, Artificial Sequence
  Synthetic
SEIEKVAREIEELLRKVAEDNRRMVERVRRLLEEVKTRNKKMVDEVKESNERLKDKVRRRNASEEIKKRVDEIVETSKELLKRSSEEVERIREEVEELLRRSHETVREVERRLKDLVRKGGERVEELKRRAERLIEELRKISEEVERRVKRLVEELEEITRRIKEENDKLVREVEKELK

SEQ ID NO: 12241 - protein, 179 aa, Artificial Sequence; identical to SEQ ID NO: 12240
  Synthetic

SEQ ID NO: 12242 - protein, 179 aa, Artificial Sequence
  Synthetic
SEVEKVVEELKDLVRKSSEKNRKVAEEVKKSNDDLRRKVEEAVREVRESNERLKREVDESNRDERIREKVERIVRESEKLLKEIEDRAREIVKTTEDLLRESHKRNKEIEEEIRDLARKGGERVEELKDRVRKLIEESERISREILKTNRKLLKELEELLKRLLKRNRELVREVKEEIK

SEQ ID NO: 12243 - protein, 179 aa, Artificial Sequence; identical to SEQ ID NO: 12242
  Synthetic

SEQ ID NO: 12244 - protein, 179 aa, Artificial Sequence
  Synthetic
SDIERVVKEVKDLLEEVRKDNERVMDEVRKLLEELKRKLRKVVEEVRRSNEELKKEVDRRNVSEEIRRKVEEIVRRSEELLKRLEDTVKDIERKVRKLLEDSHREVKKAEDRIRELLKRGGEDVETLRKEVEELADDLRRISEEVRDRVRKLVTKAEEILRRVLETNKKLLKEVKETLK

SEQ ID NO: 12245 - protein, 179 aa, Artificial Sequence; identical to SEQ ID NO: 12244
  Synthetic

SEQ ID NO: 12246 - protein, 179 aa, Artificial Sequence
  Synthetic
SEIEKVAEEIKKLLRKVEEDNKTVVEEVRRSNEKLKRDNDKVVRDVERSNRELKEELDRSNVDEEIRKKLKEIVDTSRELLRESSERLEKIVRETEKLLEDSTREVKRVVTEIKDLVRKGGERVEELKKRVEELARRAKEISDKVRDDNEKLLRELREITKRVKEENDRLLKEAKDAIK

SEQ ID NO: 12247 - protein, 179 aa, Artificial Sequence; identical to SEQ ID NO: 12246
  Synthetic

SEQ ID NO: 12248 - protein, 179 aa, Artificial Sequence
  Synthetic
KEIEDVAKRVEELLRESSREVEEVLREVEELVRRSTRRNEEAVRRVRKSNKELEDEVRRSNRSEDIKRRVKEIVEESKRLLEESSKRNRDIAEEIRKLLETIKRLNDEMVRRLKELVKKGGEDVKTLLDEAKRLVDRSRELLERLLRDVRRLIKESDKITRELERKNEKLLKEVKEEID

SEQ ID NO: 12249 - protein, 179 aa, Artificial Sequence; identical to SEQ ID NO: 12248
  Synthetic

SEQ ID NO: 12250 - protein, 179 aa, Artificial Sequence
  Synthetic
SEIEDAEREVRRLLRESSERVKTVIEEVRELLRRVKRENDEAVKEVEKSNRDLEDKVRRGNLSEEIKKKVEDIVRESEDLLRRSSERVRELVEEIKRLLEELKKRNDELVRRIEELVKKGGERVEELKERVKRLVADSERLLKELRDRVKELADEARRTTEEVLRRNRELVRRIEEDIR

SEQ ID NO: 12251 - protein, 179 aa, Artificial Sequence; identical to SEQ ID NO: 12250
  Synthetic

SEQ ID NO: 12252 - protein, 184 aa, Artificial Sequence
  Synthetic
SELDEVLKTVRKIIEENEKIVKEVLDTSRRSVEEVRKHTKEVLDRVRELAKELEDATRKTSRKEDLERLLREVADRIRKLIEENRELVDRVNKENRRLIRELEERNKRSAEDLKRLIDELRKSSQTEEVDKVAEEIEKLVRESNRKVREVVKEIEKLNRDMRKESEDAVKEIEELLRTLEEKVR

SEQ ID NO: 12253 - protein, 184 aa, Artificial Sequence; identical to SEQ ID NO: 12252
  Synthetic

SEQ ID NO: 12254 - protein, 184 aa, Artificial Sequence
  Synthetic
SELDEVLKTVEKIIRDNEEIVKEVLRRSERSIKELKKHTDDILRKARKLAEELKRVVERTEDKRELERLVRRVEKEVRDLIRENRELVKEVNDRNKKLIDELKKINDDSRKTLEELIRDLERREDDKRVKDVAERIRELVEESNRKVREVVERIKDLNRKVNKTSEDAAREIEKLLEELREEVR

SEQ ID NO: 12255 - protein, 184 aa, Artificial Sequence; identical to SEQ ID NO: 12254
  Synthetic

SEQ ID NO: 12256 - protein, 184 aa, Artificial Sequence
  Synthetic
DELEEVLKRVREIIKRNEDHSDRVREKSRESVKELEEHTERVLRDVERLARELEEMIDKTDDKRDLKRLVEEVRRRIKKLIEENRRLIEEVNRRNEELIKENEKLNRESEERIRELIEDLRRRRQDKKVDDVAREIEKLLKESNDKSRELVKEIKDLNKRLNEKSEEAVKRIEDLLRRIEERVR

SEQ ID NO: 12257 - protein, 184 aa, Artificial Sequence; identical to SEQ ID NO: 12256
  Synthetic

SEQ ID NO: 12258 - protein, 184 aa, Artificial Sequence
  Synthetic
KELEDVLERVKEIIKRNEEILDKVRREVEESVRRAEEILKEVLERVRDLVRKLDDIKDKMDDKKDLKKIVDDVKKEIEDLIKELEEIITELNKENRDLIRRLREINKRSREELEELIRDLDRRRRDEEVKRVADEIKRLADESNEKVRRVVRRIDELNKEVDRKLKEVMKEIKKELEDAERRVR

SEQ ID NO: 12259 - protein, 184 aa, Artificial Sequence; identical to SEQ ID NO: 12258
  Synthetic

SEQ ID NO: 12260 - protein, 184 aa, Artificial Sequence
  Synthetic
DELEEVLRRVRKIIEENKEIVRRVLEDVKRSVEELERHTERVLREAKRLADELEDARRKIERKEDLARLVEEVKREVTRLIKENKDKIRKVNEDNRKLIEELKKINDDSKRTIDELIRDLDRRRRDEEVKRVAKELRELLERSNREVRRVVEEIKKLNDEVRKKSEEMRRRIEKLLEELERKVK

SEQ ID NO: 12261 - protein, 184 aa, Artificial Sequence; identical to SEQ ID NO: 12260
  Synthetic

SEQ ID NO: 12262 - protein, 184 aa, Artificial Sequence
  Synthetic
SDLEEVLRRAEKLIEDLERIVRKVLEDSDRSIDEVRRHTEKVLRDVRKLAEELKDIARKTSRKEDLRRIVEEVKREVKELIKDNRRLLERVNRENEKILRELRKIVEKVKRDVERLLDALDKRSRTEEVKRVIDEIRDRLRKAEERVRKVIEDIKRKNKKLREDSEKAEREIDELLRKVEEDVK

SEQ ID NO: 12263 - protein, 184 aa, Artificial Sequence; identical to SEQ ID NO: 12262
  Synthetic

SEQ ID NO: 12264 - protein, 184 aa, Artificial Sequence
  Synthetic
SELEEVLERVKDLLKKLKEHSDRVLEESKESIDRVRKHTEEVLRTARELIERLDEMRKRTSDKKDLKDLVEKVRKTVEDLLRENEELLRRVNDRNRKLIERNRDLLRKVATTVDRLIKELDKRSRTEEVKDVAREIRRRLDELRKDSERVAEEIRRLNKKLRDESRKAIKEIEELLRRVTKKVE

SEQ ID NO: 12265 - protein, 184 aa, Artificial Sequence; identical to SEQ ID NO: 12264
  Synthetic

SEQ ID NO: 12266 - protein, 184 aa, Artificial Sequence
  Synthetic
DELEEVLERVRKLIDELRKHSKEVLDTVRDLLRRHKKKNEDSLRTVRKLLTDLEDAVRKIERKEDLRRLIEDVKRKVEKIIRDNERHLREIEEEIRKLIEENRKLIEEVIRRIEELIKELDKRERDERVKRVAEEIKKLLEDLRKESEDVVKELEDLLDELRRRTEKVVREIEELLKRLEERVK

SEQ ID NO: 12267 - protein, 184 aa, Artificial Sequence; identical to SEQ ID NO: 12266
  Synthetic

SEQ ID NO: 12268 - protein, 177 aa, Artificial Sequence
  Synthetic
SEVERVERRLEKVIEEDKERTKRVEREVEDSNKKDDDLTREVLDRVRKSARDVERKLEEGKDEELLRRVLARHEEKNKKLEDDLRESTRRNAEEIKRLKKEIKESTDRTRRELEDLERKLDSREALRRLRELVKKLEDDNRRVLRRLDKLLDDVRKKNEEAMRESRDLSRKVAEKIR

SEQ ID NO: 12269 - protein, 177 aa, Artificial Sequence; identical to SEQ ID NO: 12268
  Synthetic

SEQ ID NO: 12270 - protein, 177 aa, Artificial Sequence
  Synthetic
DEVREVEKRVRESNERDKKLLREVLEEVRRSDKDDDDRTRKVLKRVEKAAEEVKRLLEKGEDRELLERVLDKLRRFIEKLKKELKESDKENEDRIRDLKRRLEESNKRNDDTIKDLERKLRSEDVIRKLRKSLKEVKDDSRRVLKELDDSLRETHKRNRDAMRRLDELLEEVARRIK

SEQ ID NO: 12271 - protein, 177 aa, Artificial Sequence; identical to SEQ ID NO: 12270
  Synthetic

SEQ ID NO: 12272 - protein, 178 aa, Artificial Sequence
  Synthetic
DEIEEIKRRIEKSSEDDKRVLRELEARAREIRKELDERVKRLEKRIKELLERLRKLKEDNRDLTEALRDLERVLEEIKRRLEEVARELKERLDEIADESRRTVEEDRRRLEELKRRVGDDRDVRRVLEEWKRLSRKNEEENKAVIEKLRALLEDLKRRLKEVLKRIAELVKKIADELK

SEQ ID NO: 12273 - protein, 178 aa, Artificial Sequence; identical to SEQ ID NO: 12272
  Synthetic

SEQ ID NO: 12274 - protein, 179 aa, Artificial Sequence
  Synthetic
RESEELRREIEKISRENKELVRRLEEAIKRLSDEDKELVERLRRETKKIADKVEDLLEKLKDVKEVVEKLLRDLKRLNDRVERESRESIKKLRDLVKKIKEASERSEREFEKLLEEIRRRRKEAEEVLREIKKIIDDNRRENREALERIKDIVRRNEEENEKALRESRKRTRELEERLR

SEQ ID NO: 12275 - protein, 179 aa, Artificial Sequence; identical to SEQ ID NO: 12274
  Synthetic

SEQ ID NO: 12276 - protein, 177 aa, Artificial Sequence
  Synthetic
SRVETIRKRVEDLIRRSEDLIRRLEEDVKRVVDEIRKLLEKLKEDDERVIRRIEDLLRKERSEEVEREIEELSKKSLDDARRVLEEIEKLARTITKEVERVLEENDRLIRKIEDEVRKINVDERVVEEIKERLDRSRRRTEEALERIRKRLEEVKKEVEDVLREVEKTNREIKKEVR

SEQ ID NO: 12277 - protein, 177 aa, Artificial Sequence; identical to SEQ ID NO: 12276
  Synthetic

SEQ ID NO: 12278 - protein, 177 aa, Artificial Sequence
  Synthetic
SRVDELRRRVEELLKRSKELLEEIKRRDEEVLRRIKELLDRLRERVDDALRKISELLTRERSEEVARRIRELLKEIEDDVRRVKKEIEDLSEDSKRKAEELLRRNEELVKRIDEEVKRINVDEEVVREIKKKLTESREDTKRLLEELKKTNDDIRKDVERLRREVEKKVRDIERRVK

SEQ ID NO: 12279 - protein, 177 aa, Artificial Sequence; identical to SEQ ID NO: 12278
  Synthetic

SEQ ID NO: 12280 - protein, 178 aa, Artificial Sequence
  Synthetic
SEVEKLLEEVRELTKRHKEELRRLNKEMEKATRDHLRKSKKLNDEAREMVRRVEELVKNNGDKDTILKTIEDVLRELEKRHKELLDTNRELLDRLRKEHDRLLKHNREVIEDVKRRLDETERAARVKEELDKLHKDLEREVRESKRTLKELHDRLRKAVEESKEHLKRLLDELRKKVK

SEQ ID NO: 12281 - protein, 178 aa, Artificial Sequence; identical to SEQ ID NO: 12280
  Synthetic

SEQ ID NO: 12282 - protein, 178 aa, Artificial Sequence
  Synthetic
DEVERLLEEVRRVVKEIEDRSRKLNEDARRVTEDHLRKSEELNRRVEDAVRRIRELTKNNGDKDKILEDLERLVREVLKAHDELLRTNRELLEEIKRRHDELLRTAEEIIRRVEERLDETEEARKIRETLKRLLDELRKKLEESKKHLDELHDRLRRELEKSKRHLEELLKRLEDELR

SEQ ID NO: 12283 - protein, 178 aa, Artificial Sequence; identical to SEQ ID NO: 12282
  Synthetic

SEQ ID NO: 12284 - protein, 178 aa, Artificial Sequence
  Synthetic
SELERLLEKARRDTERHLRESERLNRELKKATDDHLRKSRELNKRLEEVVRRVEEESRNNGDKDELLKRLEELVRRLKEEHERLLRTNRELLRRLTEEHERLLKHNRDLLKDIRDKLEKTREAKKVEDDLRDLHRRLKEAVDRSKKHLEDLHKELEDELKRSIDHLRKLLEEVKRKLD

SEQ ID NO: 12285 - protein, 178 aa, Artificial Sequence; identical to SEQ ID NO: 12284
  Synthetic

SEQ ID NO: 12286 - protein, 178 aa, Artificial Sequence
  Synthetic
SRVEDLLRRVREVVKRVKKDLTKLLEEVKRMTDEHLKRSKELNDRAEEIVRRLKELLDRRGDKDEILRRIEEVAKRLTEEHKRLLKTNKEVLDEVRKELERLLDELREIIERVKRELDDTERAREVVERLDELLKEVADRVEEVKDRLRKLHRKLEESVKKSLEHIKRLIDDLRRKAK

SEQ ID NO: 12287 - protein, 178 aa, Artificial Sequence; identical to SEQ ID NO: 12286
  Synthetic

SEQ ID NO: 12288 - protein, 178 aa, Artificial Sequence
  Synthetic
RELEKLLEDARRVVTTLTRASEKLNEDVKKVTEEHKDRIRRLLDTVRRIVEEVDKRTKGKGDKEKLLRELEKAIRDVERKLEELLKTNEELLREVKKKHDELLRTITEVMKEIAERLKKTEEARKVKEELDRLLEDLRKKLEDSKRHLDELHRELEETVREVSERLKELLDAVRRRAK

SEQ ID NO: 12289 - protein, 178 aa, Artificial Sequence; identical to SEQ ID NO: 12288
  Synthetic

SEQ ID NO: 12290 - protein, 178 aa, Artificial Sequence
  Synthetic
SELEKLLKDVADMVREITERSKKLNDELKKLTEDHDRKIKRLNERLEEIIREVEKLVDDNGDKDRILARVEKLVEEAKRAHDDLLRTNKEMVDDLKRRHDELLRRIDEIIKDARRKLSETDEARKVAERLKELLDRLRRKLEESKRHADELHERLRKSVEDSKKHIKDLVDELKRRVD

SEQ ID NO: 12291 - protein, 178 aa, Artificial Sequence; identical to SEQ ID NO: 12290
  Synthetic

SEQ ID NO: 12292 - protein, 178 aa, Artificial Sequence
  Synthetic
SRVEELLKRLEDATRRHLEVSKRLNDDLRRATKDHLDKLRELNERVKKVVDDVVEKIKSNGDKDKLLRDAEELVRRVKKRHDELLKTNEDLLRRLEELHKRLLDHNRELLREIKERLDDTEEAREVRERLDRLHEELEKEVRRSEKTLKELHDRLRKEVERSKRHLDELLKDLEDKVR

SEQ ID NO: 12293 - protein, 178 aa, Artificial Sequence; identical to SEQ ID NO: 12292
  Synthetic

SEQ ID NO: 12294 - protein, 178 aa, Artificial Sequence
  Synthetic
SRVEKLVREVEKVVEEVERTIRKLLEDVKEMTDRHLKMIEDLNRELEEIVRRVTELIKNNGDKDRILEEVEKAVEEVDRRHKRLLETNKEIIDEVKKRLDDLLRRLRKIADEVRKRLDDTDEARKVKKRITELVERVEREVDRVKKELEKLHERLKREVEKSSEHIKRLLDELRKRAE

SEQ ID NO: 12295 - protein, 178 aa, Artificial Sequence; identical to SEQ ID NO: 12294
  Synthetic

SEQ ID NO: 12296 - protein, 178 aa, Artificial Sequence
  Synthetic
RELEEILRRVKEVTKDHLDKIDELNKRLDKATKEHLERLRDLNRRLKEVVERIEEEIRNNGDKKKILERLERVIRELRKRHKDLLDTNRKLLEELRKRHKELLDHNREVVERVEEELKETREADKVRKDIRRLHEELAREVKKSEDHLRKLHEELRDEVRRSEEHLDALLEDLKRKVD

SEQ ID NO: 12297 - protein, 178 aa, Artificial Sequence; identical to SEQ ID NO: 12296
  Synthetic

SEQ ID NO: 12298 - protein, 178 aa, Artificial Sequence
  Synthetic
SELEKLLRDMEEATKRHDEMLKKLNDEIRKVVERILKELEDLNRRLEEIVRRLKEESKNNGDKDRILEEIRRVVRELEERHDRIEEEIRRVLERLEREHERLLEHNRELLEDIKRRLSKTEEADDVRRRLERLHRELRKSVETSKKHLKELLDRLAKSIEDSKKHARELLKRLEEDIK

SEQ ID NO: 12299 - protein, 178 aa, Artificial Sequence; identical to SEQ ID NO: 12298
  Synthetic

SEQ ID NO: 12300 - protein, 178 aa, Artificial Sequence
  Synthetic
SEVEELLDRVRKVVEDLMRESKRLNDELKKIVDDILRRLRELNKEIKDVVDEIKKLLDNNGDKDEILKTIKKVLEDLKRKHDELLKRITEVVEDLKRKHDRLLEEAEKVIEDVERKLDKTEEADKARKDLKRLLDRLRREVERSKEEMDKLLEDLERAVRESEKHLEKLLRDLERRAR

SEQ ID NO: 12301 - protein, 178 aa, Artificial Sequence; identical to SEQ ID NO: 12300
  Synthetic

SEQ ID NO: 12302 - protein, 178 aa, Artificial Sequence
  Synthetic
SRLEELLKRLDDIVKRVLTKIRELNERLKKIVEELLRRSEELNREVRRVAEEIRRLEEGNGDKDKILDEIRRILKRLKEEHERLLKEAKEVVDKLRRDHEELLRELKEAADDAERKADDTDKARDVRRTIRKLVRDVAEAVRRSTEHIDKLLEDLEREVRRSERDIERILRELEEEAR

SEQ ID NO: 12303 - protein, 178 aa, Artificial Sequence; identical to SEQ ID NO: 12302
  Synthetic

SEQ ID NO: 12304 - protein, 178 aa, Artificial Sequence
  Synthetic
SDVEKLLEDVRRMTEEHKELIKELNERVERIVRKVVEDSKKLNDELREIVKRVEDESRNNGDKDKLLKELRDVVRELKKRHDDLLRDAERVIEEAKRRHDELLKHNKELIDDVKRRLQETEEAARVREDLDRLHEELERFVRESKKHLDEMLKELRRRLERSKEEIDRLVKEAEEKLR

SEQ ID NO: 12305 - protein, 178 aa, Artificial Sequence; identical to SEQ ID NO: 12304
  Synthetic

SEQ ID NO: 12306 - protein, 175 aa, Artificial Sequence
  Synthetic
REVEEVLKEVKKIVDRNREELKRVLDEIRELVKRIEDDLRRVNEESEKLVRTLLELMRRGELREEEIRKIIEDIERKYRELERKVEEIIKEIEERITRLEEKNRRNLEDIRRLLDEINAPEEVRERIERLIEKSERDVREVKKKVEELARRLREEVEKLKKHVKRLLEELKKAAD

SEQ ID NO: 12307 - protein, 175 aa, Artificial Sequence; identical to SEQ ID NO: 12306
  Synthetic

SEQ ID NO: 12308 - protein, 179 aa, Artificial Sequence
  Synthetic
SEAEDALRKIKKLVDEVVERIKKVDDDSRKLVEEVERTIEKLDKESEDLVKKVKDMKRRGDVREKDIKRVIDTSRELVKKLKEDVDRVVEEIKDLNRKLNEDVKRVMDEIRELLKELEKRGVLREEVKKEVKRLLEELKRRLDESNKRNKRLIDELRKKLEDSRRRNEELLRDLKETAT

SEQ ID NO: 12309 - protein, 179 aa, Artificial Sequence; identical to SEQ ID NO: 12308
  Synthetic

SEQ ID NO: 12310 - protein, 179 aa, Artificial Sequence
  Synthetic
DEAEEVERRSRELVERAKTEIEKLDRESKRLVDTVARKIEEVDKRSEELVRTVEELRRRGDAREEKIKKVIEDSKELVRKLKEIVKKVIREIEKLNDELNKEVERLSKESEDLLKKLREDGILREEVEKENRELNRRLKEALDESNKRNRTLLEDLRRKLRESEERNRRLLRKLEEDAR

SEQ ID NO: 12311 - protein, 179 aa, Artificial Sequence; identical to SEQ ID NO: 12310
  Synthetic

SEQ ID NO: 12312 - protein, 179 aa, Artificial Sequence
  Synthetic
SEAEEALKKVEELVRRVEEEIKRVDERSKDLVRRVERKLEELVERSKELVKRLLDMRRRGDIREEEIERVSRESKRLLDEAEKDVRRVVREIEKLNEDLNRRVDKVAKEIRDLVRDLKRRGVLREDVERRVRELIERLKRKLEESNRRNKKLIDELRKRLEEVKRENEKLNEDLERETK

SEQ ID NO: 12313 - protein, 179 aa, Artificial Sequence; identical to SEQ ID NO: 12312
  Synthetic

SEQ ID NO: 12314 - protein, 179 aa, Artificial Sequence
  Synthetic
DELERVLKRVKELIDKSRREDEELDERSKELVKKVLDELKDALRKIEKLVRDLKEMTDRGDIREEEIKRVAKEIEELLEELERRVRKVTEEIDRLNKESHERNRRVAEEIKRLLDELKRRGVIREEVRKDAERLIRENEEDNRRSNERNKKILKELKDALDRVKEEVRKLIRRLEEEAR

SEQ ID NO: 12315 - protein, 179 aa, Artificial Sequence; identical to SEQ ID NO: 12314
  Synthetic

SEQ ID NO: 12316 - protein, 179 aa, Artificial Sequence
  Synthetic
SEAETVLEEVKKLVERSREEDKEVDDESRELVERVEEKLRRVLKKSKEDVDRVMRLIEEGKVREKVIEEVSRTSEKLLRDLEETVRRVVKRIEELNRESHERNRRLEEDIRRLADELRKRGVLTEEVEDTIRRLIEENKKRNEESNRRNRELIKKLERKLEEVKRRNEDLNRKLEETAR

SEQ ID NO: 12317 - protein, 179 aa, Artificial Sequence; identical to SEQ ID NO: 12316
  Synthetic

SEQ ID NO: 12318 - protein, 176 aa, Artificial Sequence
  Synthetic
STLEEAEEEVRRLIKRTEDETRRVADEVKKLLDKHRRATEDVEKKVRELLDRLKKDEKDEDVRRVEERVRELLEELKRTSERIAEEVTRLLEELERSSRRVVEENERLLEELKRLTDDREIEKIVRRAKETNEENREIIERILKEIKELIDDANRKLKEILDRIRELVETVKRKAK

SEQ ID NO: 12319 - protein, 176 aa, Artificial Sequence; identical to SEQ ID NO: 12318
  Synthetic

SEQ ID NO: 12320 - protein, 176 aa, Artificial Sequence
  Synthetic
STLEEVERRIRELLDRHRRATEEVEKEVDRLNKETRDELDRVRKEIEKLLKDLDRKERDEEVKDVERRVRELLKEAEKIVRDLERENKRLLDELRKTSKEIAKRVTDLLEDLRRLTDDEELRRILKRVEKLVKDLNDKLRKILDDARRSNEEIKRRLEEILKEVKRLVDTVTERAR

SEQ ID NO: 12321 - protein, 176 aa, Artificial Sequence; identical to SEQ ID NO: 12320
  Synthetic

SEQ ID NO: 12322 - protein, 175 aa, Artificial Sequence
  Synthetic
SRIERAEEELKRSLKELREDLERVVRTIRKILREHEEKSKDVKRRIEELLREVKKRMVKDREILRELEERVRKIEEDLERISDELRKVAERVIEEAKRLVDEDADRIRKIIELLRAGKDVDKVLRDVEDLNRTTLKLLEDLLRTVEEVVRRADKLLEDLLREIKRLVDEVMERDR

SEQ ID NO: 12323 - protein, 175 aa, Artificial Sequence; identical to SEQ ID NO: 12322
  Synthetic

SEQ ID NO: 12324 - protein, 175 aa, Artificial Sequence
  Synthetic
SEIEEIEKEIRKSVEEVKKTLDKVVTEIRKSTREHEKKSEEVRKRSKELNKDLRDRLVRDEKILKEVEDRSREMNDRLRKLSERNRKLNEDLIRRLEELVKRDKERVEDVERKLRAGKDVKTVLDDVRRVNEETKKRIRDLLEESKRSDEEADRRAEELLERNERLVRKVAEEAR

SEQ ID NO: 12325 - protein, 175 aa, Artificial Sequence; identical to SEQ ID NO: 12324
  Synthetic

SEQ ID NO: 12326 - protein, 175 aa, Artificial Sequence
  Synthetic
SRIEEVIRRAREILEDHRRKSTEVRERLKKLLKEHEDKSRRVKEESEKINRDVKRELVRDRKILEELKRRSDRLNEELDRLSKDVADKIRELIKELKRISDDLKRRIEEIIEMLRRGKDVDKVLKEIEDLVRKADELLRELLKRVEDLVRRADEVLEELLRRNRKLAEDVMRKDK

SEQ ID NO: 12327 - protein, 175 aa, Artificial Sequence; identical to SEQ ID NO: 12326
  Synthetic

SEQ ID NO: 12328 - protein, 175 aa, Artificial Sequence
  Synthetic
REIEEVEKEIKKLLDEHRKKSDDVVRKLEKILRDHERRTEDVKRESEKINREVEKRKVRDREILTDLKRRSKELNDRLDKLSRELAERIKELIKRLRDLSRRVAEVVREVRKLLRAGKDVDEVLERVRELLERADRKLEELLERVRKLVEDANRVIEEVLERNKRLADEAMKKDK

SEQ ID NO: 12329 - protein, 175 aa, Artificial Sequence; identical to SEQ ID NO: 12328
  Synthetic

SEQ ID NO: 12330 - protein, 175 aa, Artificial Sequence
  Synthetic
SRIEEIVKRIRDILKEHEDKSRRVVEDIKRSTEELKRALREVVERIKTILDDVRRRLVRDEKILRELEKRVREVIRKLEKLVEEDEDRDRELIERLKEISRTLRDVVRTVEKLLRDGKDVDKVLEDVRRVAKEADDRLEELLERSKKLNKETLDELERLLREVEELVKEVAERDR

SEQ ID NO: 12331 - protein, 175 aa, Artificial Sequence; identical to SEQ ID NO: 12330
  Synthetic

SEQ ID NO: 12332 - protein, 175 aa, Artificial Sequence
  Synthetic
SRIEEVSERVREILRRHEEKSREVVERIKKSTKELRDEVRKVRATSKEINDDVRRRLVRDDKILKELEKRSKELNDRLDELVRRDEELDRRLIEELKRLSDELRKELEDVDRKLKAGKDVDRVLERVEKMVRDADKRIDEVRKESERLNEETRRRIERLLRENKKLADEVAERAR

SEQ ID NO: 12333 - protein, 175 aa, Artificial Sequence; identical to SEQ ID NO: 12332
  Synthetic

SEQ ID NO: 12334 - protein, 175 aa, Artificial Sequence
  Synthetic
SRIERVEERMRELLDRHRETSKRVVEEIRKSTEEHKEKSERVVRESERLNREVERELVKDKDILRELKKRSKELNDELRKLSKDNEERNRELIRRLEELSKRVEDTIREVIKLLRAGKDVDRVLEEVERLVTEVNREIKELLERSKRSDKEADRRLEEVVKTNRELAERVARRAT

SEQ ID NO: 12335 - protein, 175 aa, Artificial Sequence; identical to SEQ ID NO: 12334
  Synthetic

SEQ ID NO: 12336 - protein, 175 aa, Artificial Sequence
  Synthetic
SEIEEVVRRLEELVKRVAEELKRVVDRIEDLLREHKDKSRRVEERSKEINEDVARRLVSDKDILRELEKESRRLNKELRELSERVEREIKKVIKEMEEMLKELEDRVREIIKLLRAGKDVKEVLERVKKLVDDLIRRLKKLLEDLKKLVDDADEEIKRVLEENEELARRAAERDT

SEQ ID NO: 12337 - protein, 175 aa, Artificial Sequence; identical to SEQ ID NO: 12336
  Synthetic

SEQ ID NO: 12338 - protein, 175 aa, Artificial Sequence
  Synthetic
SEIEDVVRRARELLERLRKRVREVVEDIRRSTEEHKEKSERVVKTSEELNKRLEDELVRDKDLLKKVKDESKKLNDELRRLSEENSKRNEELIKRIEKLVDDVAERIKEIEKMLRDGVDVDKVLEDVRRLVKEAVDRIDKILRDSRESDRRADEEIKKVLDRNRELVKKVADEDT

SEQ ID NO: 12339 - protein, 175 aa, Artificial Sequence; identical to SEQ ID NO: 12338
  Synthetic

SEQ ID NO: 12340 - protein, 175 aa, Artificial Sequence
  Synthetic
DEIERVEEEIRRLLEEHKKRSDEVVRRLEKLLKDHKEVTRKVVEESERINRDVERRLVRDERILKDLKDKSKELNDELRKLSEDVERMIKRLIEELRKLSKDVEDTIRELEKALKAGKDVKEVLERIRKLVKDVNKRLEEILEEVERLVRRANRRIEELLERNRRLVEEVARRDE

SEQ ID NO: 12341 - protein, 175 aa, Artificial Sequence; identical to SEQ ID NO: 12340
  Synthetic

SEQ ID NO: 12342 - protein, 175 aa, Artificial Sequence
  Synthetic
SEIEKVEEEIRRILEEHKRISDEVKRRVRKSTEEHEKRTEDVERRSREINEEVEARLVRDKDILRDLKRRSKELNDEARKLSKRNRETNTRLLEELDDISRELKERIERIEKMLKDGKDVEEVLRRIRKLAEEVNKELKRLLDESKESDDRLNKRLTEILRENEELARDVARRVK

SEQ ID NO: 12343 - protein, 175 aa, Artificial Sequence; identical to SEQ ID NO: 12342
  Synthetic

SEQ ID NO: 12344 - protein, 175 aa, Artificial Sequence
  Synthetic
SKEERIEEALRDLVRRHKEVSRRVVETIKDLAKKLEEKLRRVETDSKRINDEVRDKLVRDKDILRDLERRSRKLNEDLRRLLREIKERLRKIIEELKRLSKDVEDKVRELIKLLRDGVDVERVLEEIKKLVEEVNRELRELLKRIEELLKRAEEMLERLLRENRRLVEEVARRDK

SEQ ID NO: 12345 - protein, 175 aa, Artificial Sequence; identical to SEQ ID NO: 12344
  Synthetic

SEQ ID NO: 12346 - protein, 179 aa, Artificial Sequence
  Synthetic
SESEELDKEIDDIVREDEELNKELRKRNDDAVRRVEKVIEDLLRRNEDAAEKVKKLLEELKDVKEVLEKLIRDLERLHRETRELLERLIRELEELHERSKRESEKSIRKVKELLERIKERSKEVRELLRKLREILEDLRRKNERTEEESEEILRRLTKLAEEVLRRSRKILEDLREALR

SEQ ID NO: 12347 - protein, 179 aa, Artificial Sequence; identical to SEQ ID NO: 12346
  Synthetic

SEQ ID NO: 12348 - protein, 179 aa, Artificial Sequence
  Synthetic
SEKDELRKRMRDISKENKELLEKLEREIRELSKENEKLNEKLRRELEELRKTIKDLLDRLKDVKEVVEELLRRAERLLERIKELLDRSNKKLEELLRKVEEDLRRSNEKLETLLREIKERSKEARELLKEAKELLEENRKRNEEILRRAEKVLRDNAEKDKRTLEKVEEILDRLRRELT

SEQ ID NO: 12349 - protein, 179 aa, Artificial Sequence; identical to SEQ ID NO: 12348
  Synthetic

SEQ ID NO: 12350 - protein, 179 aa, Artificial Sequence
  Synthetic
KEAEDLEREMREISDRNRKLNKKLRRDIKEISDDNRRLLEELRRRLKKMEEDVRRLLEELKDDKDVVEELRKELEELVRRIEKDLRKSNEKLEKLLRDVEEALRDSNEKLERLLRKIKERSKEVRELLTEARKLLERNREEDKKSLDDARKALKENKEENDKIKEEIDKILRELEEELR

SEQ ID NO: 12351 - protein, 179 aa, Artificial Sequence; identical to SEQ ID NO: 12350
  Synthetic

SEQ ID NO: 12352 - protein, 179 aa, Artificial Sequence
  Synthetic
EESERLAKRVDDLSRENEELNKRLRDEMEKISRENKELLKDLRRKADKIVKDVERLLEELKDVDEVVRELKKRLEDLMDEIRKALKRSNEKLKKLLEDIKEALERSNRKLKELADDIRRRSKEARELTRRIEKLLKDNTDRDKKSEDDLRELLKENKKRNDEILEEIRRILEELRKKLT

SEQ ID NO: 12353 - protein, 179 aa, Artificial Sequence; identical to SEQ ID NO: 12352
  Synthetic

SEQ ID NO: 12354 - protein, 180 aa, Artificial Sequence
  Synthetic
SLDKEIERKVEEIERRLKESNDRLREKVDEIRRRSERLNTELNERVDRIAERIRRMKRDGTKDVEELVRKLAKELRELLKEVVERDEKLLRDLEKTAEEVIRENKRLLDELRKLVEDLKRAGSLEERLEEKIDRIIRELERRNDKSREELEKIIRELRERTKESEKRLEDIIRELEERTR

SEQ ID NO: 12355 - protein, 180 aa, Artificial Sequence; identical to SEQ ID NO: 12354
  Synthetic

SEQ ID NO: 12356 - protein, 180 aa, Artificial Sequence
  Synthetic
DADKRLRTDVRRIVEDLKRSNEELRRRSEEIAKRSDKLNKELNKKSKEIEERVKRMRDEGRKDVEELVKRLIEESRRLTEEVLKKDEELVRESRRLTEEVKKRNDKLLRELEKRLDELKKEGVITKDLEKELRDIIRELRERNRESEEEDERIIRELEKRTKDSEKRDDEILRELEREIR

SEQ ID NO: 12357 - protein, 180 aa, Artificial Sequence; identical to SEQ ID NO: 12356
  Synthetic

SEQ ID NO: 12358 - protein, 180 aa, Artificial Sequence
  Synthetic
SLVEKIAREVRKIKEDSKRLNDELNEKVRKAVEDLERSNRELEKRVREIEERVRRAETEGRKDVEELVKRLVDELRDVLEKVKRTNERLLRELERTAKEVSDRDRELVRRLRELVKDLKRKGSATKELEDDIERIIKELEELTRRSEEKLRETIERLEERNKETAERLERIIKELEERSK

SEQ ID NO: 12359 - protein, 180 aa, Artificial Sequence; identical to SEQ ID NO: 12358
  Synthetic

SEQ ID NO: 12360 - protein, 180 aa, Artificial Sequence
  Synthetic
KEAEELEERVKRIEEESRRLNRELNEKVKDIAKKLEDSNDKLRKDSEEIAERVKRARTEGRKDVEKLVDKLIKESEKLTEEVKRENKRLMDELRELLKKVKDDDRELLERLRKLVKDLRREGSIKDEVVKKLEDIIREIEKTTRESEKRLEDIIRKLKKKNDDTEREDREIVKRLREETK

SEQ ID NO: 12361 - protein, 180 aa, Artificial Sequence; identical to SEQ ID NO: 12360
  Synthetic

SEQ ID NO: 12362 - protein, 182 aa, Artificial Sequence
  Synthetic
SLLEKLERDVERLSEEDEKLNEDVRRVDREIVERDKKLNREVNERVKRLAEEVKDIRRRVKDDETAKRLLDKVAEEIKELAKRLEEESRKLVRESEELVKRLERMSEELVKEIERLVKKLKDEGKLRERAEERLRRIIKRNKEENERTAKESRDSIEELKERNERSKRRLEKILEDLERETR

SEQ ID NO: 12363 - protein, 182 aa, Artificial Sequence; identical to SEQ ID NO: 12362
  Synthetic

SEQ ID NO: 12364 - protein, 182 aa, Artificial Sequence
  Synthetic
REAEELEKRVRKIEREDDKLNEELNRRAKDVSREDKELNDRVREVVRRLVEEVDRIRRDVKDKRDAREKVREIMDRIRRLLEELKRRSDELAKELRELLEELERRSKKLVDEIKEVVRKLKEDGKLREELEKKLEDIIRELKKRNDESAERIRRLIKTNEDENRRTAEEIKKILDDIRRKVK

SEQ ID NO: 12365 - protein, 182 aa, Artificial Sequence; identical to SEQ ID NO: 12364
  Synthetic

SEQ ID NO: 12366 - protein, 186 aa, Artificial Sequence
  Synthetic
SELEEIRKKIDDLRRRVEEINERITREDKRLVDELKEINKRITDRVRKIARDVEELLRKGEPKSRVKKMLDDAERELRRLLKELREMHERIVETSKELNERLREVHKRIAEEAKKLVDELRREGGRDEERLRTVDEEVKKILDELREKLDRNRRRSEETNRRLDELLKENARRVEEIIRRLREEVK

SEQ ID NO: 12367 - protein, 186 aa, Artificial Sequence; identical to SEQ ID NO: 12366
  Synthetic

SEQ ID NO: 12368 - protein, 186 aa, Artificial Sequence
  Synthetic
SELEEIKKRVEEIARTLEKLNRDITKLDEDLAREVEDINRRITETVEEIAKRVERLREKGEPKEDVRRVLDEVEKELKKLLDELEKFHRDIMETSKDLLRRLREAHDRVIKELKDLVRELEREGGRDKERLDKLRTEVKKIMDDLRRILEKNAKDSKRSLDRLRKILEDNKEKVKRIADRLREAVR

SEQ ID NO: 12369 - protein, 186 aa, Artificial Sequence; identical to SEQ ID NO: 12368
  Synthetic

SEQ ID NO: 12370 - protein, 178 aa, Artificial Sequence
  Synthetic
KDEKRIKDVLKKLEDDNKKLNDEIKKLNEEIARKNEELNKRIEDMIRKAEREVDELKRNGADKEVLERILRRVKELIDRLTRALEDSLRESKRLSEELARALEESLRRIKEVIDRLREENKEAKEVDDEARRILEKLRRENERTKEESKEINEELEKRNRESVERIKEILRRLEEKLR

SEQ ID NO: 12371 - protein, 178 aa, Artificial Sequence; identical to SEQ ID NO: 12370
  Synthetic

SEQ ID NO: 12372 - protein, 181 aa, Artificial Sequence
  Synthetic
SEVERLLREVEKVLRRVVKRSRDLNEELKKRSKEHKETSERLNREMKRVLREVEKKIDETRDKETLDRLLREVEEVLKELKKRHDELLRHNKKVVDELKEEHKKLLKEAEDALREVKKELDKRGGVREVKKRLDELLKRLEREVRESEKRMDRSHEDVRREAERSKKELEELLKKLEDKVR

SEQ ID NO: 12373 - protein, 181 aa, Artificial Sequence; identical to SEQ ID NO: 12372
  Synthetic

SEQ ID NO: 12374 - protein, 181 aa, Artificial Sequence
  Synthetic
SEVEKILRDVEDATRRHKRTSEELNRRLEEVVRRVKEESKELNERLREVVKRVKEEIRKTTDKETLDRLAEELKRVVEDLKRRHEELLRRAEEVVKDLKRRHDELLRHNRRLLKEVKERLDDRGGVREVKKRIDELHDDLRRVMEASKERIDRILEDLRRVVERSKEELRKLLEDLKRTVD

SEQ ID NO: 12375 - protein, 181 aa, Artificial Sequence; identical to SEQ ID NO: 12374
  Synthetic

SEQ ID NO: 12376 - protein, 181 aa, Artificial Sequence
  Synthetic
SEVEELLKRVEEATERHKREIERLEDEIRKVLEDVDKRSKELNDHNRDVIEKIRERIERTRDKDTLKKLVDDLRELSERHKREHDRLLEEVKRVAEDIKRRIDELLRHNEELLRDVKRRLEERGGVREVKTELDKLHEDLKRTAEEVKKRLDDLLKELEKKVEESKTEIDRSLEELEKTAR

SEQ ID NO: 12377 - protein, 181 aa, Artificial Sequence; identical to SEQ ID NO: 12376
  Synthetic

SEQ ID NO: 12378 - protein, 177 aa, Artificial Sequence
  Synthetic
DEERRVKEELEKLLEDLRRTIKKVEEDSDRINKDLERVIRRSEREADKILEDLERAGVSEELLKRLEDLVKRIKETHEELLRRLKKSSDELREELERLLREIEKMVRDAEDVLRRNVSEEKLRELLERAKKLVEDIKRRLKELLDRHRDLVRRIKERSKELNKRLKDLIDEIKERAR

SEQ ID NO: 12379 - protein, 177 aa, Artificial Sequence; identical to SEQ ID NO: 12378
  Synthetic

SEQ ID NO: 12380 - protein, 177 aa, Artificial Sequence
  Synthetic
SSKDDLRRKIEKLLRDLERVIRESEKRSEEINRDLERTLKRIKEEADKILDKVRRGGVSEDLLRELEELVKKIERRLEELRKELEDSSRRLRETHERLRRDLERIVDELEKALRNNIDDRLLEKLLRELEKLIRRIEEESRKLNEEHEKLLKRIKDELKKLLDDLRRLAREIEERRR

SEQ ID NO: 12381 - protein, 177 aa, Artificial Sequence; identical to SEQ ID NO: 12380
  Synthetic

SEQ ID NO: 12382 - protein, 177 aa, Artificial Sequence
  Synthetic
KSTEDAKREIDKLLEELEETIRRAEDRSRRLNEDLARTLKRIEEELKRINEEVEKRGVSEKLLEDLRRSTEELKRSLRELLRRLEESSRRLKERAKRLLAELERIVEELKRALDDNISDELLKKLLDELRELIDRIRRDLERLLREHEELIERIKRTLEELLRRHRELVKRIEETAR

SEQ ID NO: 12383 - protein, 177 aa, Artificial Sequence; identical to SEQ ID NO: 12382
  Synthetic

SEQ ID NO: 12384 - protein, 177 aa, Artificial Sequence
  Synthetic
SEEDRLEEEIKRILDDVARVVKRIKEELKRINDELKKVIDESRDHARRVNDDVRRRGVSEELLRELKESTERNDELLKKLLKEAKESTETITRELDRLLEELKKIVDELRELLKKNISEELLKELLKRLEELARRIKKKLEELLREHEKLLEEIEKALRRSNEEHRKLVEKIKRDAT

SEQ ID NO: 12385 - protein, 177 aa, Artificial Sequence; identical to SEQ ID NO: 12384
  Synthetic

SEQ ID NO: 12386 - protein, 177 aa, Artificial Sequence
  Synthetic
DEEERVKEAVERLLRDLERAIKESEDHLRRLNEDLDRVIRESKEHLKKVNDDVRRAGVDKRLLDELKKSTEDNKKTADDLKRKLKRSTDENKKRLKRLEEELRRLVERLKEALRDNISEELLKKLLEELKRLIERIKRDLKRTNDEHEKLIREIKKRLEDSNRDHERLVKDIKETAR

SEQ ID NO: 12387 - protein, 177 aa, Artificial Sequence; identical to SEQ ID NO: 12386
  Synthetic

SEQ ID NO: 12388 - protein, 177 aa, Artificial Sequence
  Synthetic
SKEDRLREELKKLLKRLREEIERLKRALEESNKDLKRTIDRSEKHLRDVNEDVKRAGVSEELLRELERSTRENKERAKELLKRHEDLVRKVEKELRDLLRRLEEIVRRVDEMLKRNIREEELDKLLKEARDLIREIEKRLEELLKRVEKLTEDAKRDLERSNREHKELADRIKETAR

SEQ ID NO: 12389 - protein, 177 aa, Artificial Sequence; identical to SEQ ID NO: 12388
  Synthetic

SEQ ID NO: 12390 - protein, 177 aa, Artificial Sequence
  Synthetic
SEAERIEEEARRLLEELRRAIERVKEEADRLLEELRDAIRKSKEHLKRLNEDVERAGVEERLLDALRKSTEDNERLLRDLLRKLEEAVRRLEEEARRLLKEAEEIVREIKKVLDNNVSEEALKRLLEKLKRLIEEIKRELKRLLDDLKRLIDEIAEALKRSNDRHEELVRRIKEKAR

SEQ ID NO: 12391 - protein, 177 aa, Artificial Sequence; identical to SEQ ID NO: 12390
  Synthetic

SEQ ID NO: 12392 - protein, 177 aa, Artificial Sequence
  Synthetic
DSKEEIRRKIDELLKRLEETIRRSEEHFRRSLDDARKELKRSRDHVRKVNKELRDRGVSEELLKEAERSTRENEKLLKELEERLKRHLEENKKIADKLLEELERLVRRLREVLKKNVDDEELERLLRDLERLIREIEKTLEDTNRSNEELVRRLKRRLEESNKRHEDLADEIRRRTD

SEQ ID NO: 12393 - protein, 177 aa, Artificial Sequence; identical to SEQ ID NO: 12392
  Synthetic

SEQ ID NO: 12394 - protein, 177 aa, Artificial Sequence
  Synthetic
SEEDRIREEMEEILRRVERTVEEIKKELKKINDDVDRTARESEKHVREVLERVEREGVDKDLLDELRKIVEENKRLAKRLKDELRKSTKKIEDDLKRLLDELKRLVEEVDEALKRNISEELLEKLLEDLKRVVEKIRRDAEDLLERHKDLVRRIKEELRRSNRKLEDLVKKISERAT

SEQ ID NO: 12395 - protein, 177 aa, Artificial Sequence; identical to SEQ ID NO: 12394
  Synthetic

SEQ ID NO: 12396 - protein, 177 aa, Artificial Sequence
  Synthetic
DEDREVRRTLEELLDDLRRVIEESERHLEKLNEDVREAIRRSEEHVRRVLDRVRRGGVNEKLLEELDKIVKENRKLLEELLRRLEESTKRNRDEAKRLLEELADIVRRIEELLRDNISEDLLRKLLEEAKRVLDEIRKTLKKTNEDHERLVERIKRELEKSNKDLERLAKEIIDRDK

SEQ ID NO: 12397 - protein, 177 aa, Artificial Sequence; identical to SEQ ID NO: 12396
  Synthetic

SEQ ID NO: 12398 - protein, 177 aa, Artificial Sequence
  Synthetic
SSKEDITKKIEELLRELEEELKKSEKHLRELNEEAKRTAEESRRHLEESLRKVEKDGVDEDLLRKLEEHVRDNERRARKLLKDLKDSTDTNRRTAKRLLERLKELVERIKEMLKRNIDDEELKKLLKELEDLVKEIKERLRKTNEEHRKLVEEIKERLKRSNESNERLVRRIEEEAR

SEQ ID NO: 12399 - protein, 177 aa, Artificial Sequence; identical to SEQ ID NO: 12398
  Synthetic

SEQ ID NO: 12400 - protein, 179 aa, Artificial Sequence
  Synthetic
SELERAEEEIEKLNRDLKRTLDEIRDRIRKINDDLRKTLRKSDEDSKRLLKELRDEVPDLREVDDRIRKIIKENKDLARELKREAEDSSRDLERILREIEETVRDSSRKLKELLERDKESGEKLKDMLDKHRKLIDDLKRRLERRLREHKRLLDEIEKRLRDSLKRIEEIVREILERAR

SEQ ID NO: 12401 - protein, 179 aa, Artificial Sequence; identical to SEQ ID NO: 12400
  Synthetic

SEQ ID NO: 12402 - protein, 179 aa, Artificial Sequence
  Synthetic
DELERIRRELERINTTLDELLKRSKEETDRILKKVEDSIREVEKKVKELLEELKRRVPDLRKVEEDVKRVLDELRRRLRKLLEKLKRLADDNRRKLKELKDEAERSSREVERLLREKKESGELLKKILDEHRDLLRRIEEELRRSLEDIKRVAKEVEERIKKVLDELRRLIEELLRRAK

SEQ ID NO: 12403 - protein, 179 aa, Artificial Sequence; identical to SEQ ID NO: 12402
  Synthetic

SEQ ID NO: 12404 - protein, 185 aa, Artificial Sequence
  Synthetic
SVLEEAEKELRKIVEDNRRTLREVKERNKKLNKENRDTIKKIEDDVRRIIRELKEDLKRSEKDELRKELKEVEEEIRKLIKDAREHSDRVIRESKKLVEELERRTRELEERIKKLIKDIADRFGGGEEDLRRLEEEIRRRSEENKKRIRDLLRRSEELSRRDKKKLKEILERIKRLADEVREKIR

SEQ ID NO: 12405 - protein, 185 aa, Artificial Sequence; identical to SEQ ID NO: 12404
  Synthetic

SEQ ID NO: 12406 - protein, 186 aa, Artificial Sequence
  Synthetic
SDLEDILRKIEDLSRKNEEELKRVLEENKKLSDDDKRRLEKILREVEKKIRKIKKDIKDEKDKEKLRKKVEDLEREAKELVDDLRRHSEELSKRSEKSLRDVKKHSDDVAKRARELVKELVDRRGKETEEVRKLEEDVRRIIERNKKLTEDLARELKKLNDDNERTLRKVEEDIRRIIADLRRTLK

SEQ ID NO: 12407 - protein, 186 aa, Artificial Sequence; identical to SEQ ID NO: 12406
  Synthetic

SEQ ID NO: 12408 - protein, 186 aa, Artificial Sequence
  Synthetic
SELDEILERLRRLSEENKRRIEEALRRNKKLSEDDERLSREIRRRVRELVEEAKEVLRREKDKDKLRDKLERIVDELRKLLEDNTRHSRKVSEDSKESLKDLRRHSKEVIETLEKLLEELIRKDGEETEEVKRVAEELDKLVKENRRVTEKVARELKKLNDKNREVNERLERELDKIIKDLRRTDK

SEQ ID NO: 12409 - protein, 186 aa, Artificial Sequence; identical to SEQ ID NO: 12408
  Synthetic

SEQ ID NO: 12410 - protein, 186 aa, Artificial Sequence
  Synthetic
SEIEKILEDVKKLADDLRRTLKRALEENKELSDRDKEELRRILEEIKKLAEEIDKLIKEEKDKDTLRKKVKDLEERVRELIKRLERHSREVSKESERSIRELERLIDEIVKRMEELLEKAIRDKGKDTERVREVARRIEKIIEDLRRDLERVRRELKKLNDDNRRVLEEVKRTVEEIIKRLRESAK

SEQ ID NO: 12411 - protein, 186 aa, Artificial Sequence; identical to SEQ ID NO: 12410
  Synthetic

SEQ ID NO: 12412 - protein, 185 aa, Artificial Sequence
  Synthetic
DEVDELLKEAEEVIREVTREHKRLLDEARKISEENKKRSEESNREVRELVRRIKEEIKKGLPEEDLKRLLDELRDMIRKVRETNERSDKEVEKVVRDILRRLRELNKRVEEIIRRILKEIRRDVRDSEKAKRVEEELKKLLDKLSRITEEVERRLEELLKDNERVSRESDEELKRILEDVERDTR

SEQ ID NO: 12413 - protein, 185 aa, Artificial Sequence; identical to SEQ ID NO: 12412
  Synthetic

SEQ ID NO: 12414 - protein, 185 aa, Artificial Sequence
  Synthetic
SEVEELLDRLRKLIEDVVREHKRLLDEVRRISRENEELIRRLLEKVEEVIRRIKERIKSGQPEEVIKRILDEARRRLRKVLEEIKRSDEEVEKMLRDVLKTLKELNDRVREIIKDILKKIRDKVKDEKTAREAEEELRRLLERLSEVTRKVEKAIEDILRRNRETSERVAREIRRLLKELEDTAR

SEQ ID NO: 12415 - protein, 185 aa, Artificial Sequence; identical to SEQ ID NO: 12414
  Synthetic

SEQ ID NO: 12416 - protein, 185 aa, Artificial Sequence
  Synthetic
SSVEELLERLRRISEENKRRIEKLLREVEKVLRELKDRHRKLLKRVEEIIRKVKEEIKSGLPEEVVKRVLERVRERVKEVLEEADRLNDEMRRIVTEVEKELDKSDKEVEDMVRDILKKIEEEVRDRETAERARETLKRLLDENRDRSKKVKEEIRRILEDLTRTTERVKREIKKLLKELEDTAR

SEQ ID NO: 12417 - protein, 185 aa, Artificial Sequence; identical to SEQ ID NO: 12416
  Synthetic

SEQ ID NO: 12418 - protein, 178 aa, Artificial Sequence
  Synthetic
DLLRKLLEEAKKILKEIKDAHEKLLRELEESNKELEKAHRKLLEDAKRMLDDLKRTDPREDLLRKLEELVRRIKEESKRLNREHAELVRRIEEISRRLNEELRRLVKKIEEELRRKVDDEDRVRDLRRALEELIKESDEVSRRLKEEIDRSLESSKKVSRDLEEELKKLIKDLEDTRR

SEQ ID NO: 12419 - protein, 178 aa, Artificial Sequence; identical to SEQ ID NO: 12418
  Synthetic

SEQ ID NO: 12420 - protein, 178 aa, Artificial Sequence
  Synthetic
SELEKLLRDDRELLKELKKAHKKLLDELKESNDRVRKRHEELLRRIREIAKRLRDTDPREDLLRRLEELVRRIEEDSKRLNEEHKKLIEEIERRSRKLNEDHERLSREIRERLERRVDDKDKVRRVERESKKTHDESREVSEKLRRDAEDSLRSSEKLSEDLERELRKLIKEVRDEAK

SEQ ID NO: 12421 - protein, 178 aa, Artificial Sequence; identical to SEQ ID NO: 12420
  Synthetic

SEQ ID NO: 12422 - protein, 178 aa, Artificial Sequence
  Synthetic
KDIERLLEELKRILEDLKRKHKRLLERLEDSNRRIRRTLEELLKRLEKLVKDLSDTDPREDLLKELKRLIDEIRRRLEELIRRHEELLREIKERSDELNKRLEKLVREAIDRMRKRVDDKDKVDDAKRRLEELLKESREVSKKLRDDIERSIRSLREEVKKLDEDAKRLLDKVREEIR

SEQ ID NO: 12423 - protein, 178 aa, Artificial Sequence; identical to SEQ ID NO: 12422
  Synthetic

SEQ ID NO: 12424 - protein, 178 aa, Artificial Sequence
  Synthetic
SVLEDLIRRDREMLKRAKEEHDRLRKEIERSNREIDEEVKRLLAEIKKIVEEVSKTDPREDLLREAKRLLDKIKEDLKRLLDEHRKLLRRILEESRKLNEEHRRLSREVDELLRRRVSDKKAVDEVRKESDDTHKESEAVSRDLKRELERSIKSLEKRIREAEEELKRILKELEDEKR

SEQ ID NO: 12425 - protein, 178 aa, Artificial Sequence; identical to SEQ ID NO: 12424
  Synthetic

SEQ ID NO: 12426 - protein, 178 aa, Artificial Sequence
  Synthetic
EELERLLEEDKELVRRVERELERLLRELKRSNDEIKKTLEDLLRRIEEILKEIRRTDPREDLLRTLEDLIKKIKDELDRLIKEHRDLVEEIEREARRLLDEHRRLSKEIKDRLEKRVDDKEKVKRAEDRSRETHRRLEEVVKKLKEDAERSIKSLEELVDKLRKELRRLLEEVREEVR

SEQ ID NO: 12427 - protein, 178 aa, Artificial Sequence; identical to SEQ ID NO: 12426
  Synthetic

SEQ ID NO: 12428 - protein, 178 aa, Artificial Sequence
  Synthetic
RELEELIKEDEDLLRRLAETLKKLLEDVRRSNEELRKFHEDLLRDLERLLEELRNTEPREELLRKLEKMIRDIERIARELNDRHERLVEKIRETLRKLLEEHKELSDRIREKMEREVDDKEKVRRVEERSRRTHKELEDLAREVDKELKKSIKSSRDVTRKVKEDADRLLKKVADDTK

SEQ ID NO: 12429 - protein, 178 aa, Artificial Sequence; identical to SEQ ID NO: 12428
  Synthetic

SEQ ID NO: 12430 - protein, 178 aa, Artificial Sequence
  Synthetic
SILETLADRDRDMVRRVKEALKKLLERDKRALERLKRVHKELLDRLRKILEDLKRTEPREELLKRLEDLIREIEETARRLNKEHEDLSREVRKILKELLDRHRELSKEIKEIMDREVDDEEKVKRVEEESRRTHKELKDVADRVETESDKSHEESKKVTDEVRKELERLLRELEETVR

SEQ ID NO: 12431 - protein, 178 aa, Artificial Sequence; identical to SEQ ID NO: 12430
  Synthetic

SEQ ID NO: 12432 - protein, 178 aa, Artificial Sequence
  Synthetic
SEAEKLLRELEDILKKLKDALKRLIEEDERLLKRLKREHEKLLKRLEEVLRELKKTEPSEELLRELKKLIEDIEREAERLNAEHERLSREVEKTLRKLLTDLERLIREIKKKLDDRVDDREKVKRVKDEADRLLKELEDVVREVKKRSDESHKRSRDVTREMKKELKRLLEELEKTVR

SEQ ID NO: 12433 - protein, 178 aa, Artificial Sequence; identical to SEQ ID NO: 12432
  Synthetic

SEQ ID NO: 12434 - protein, 178 aa, Artificial Sequence
  Synthetic
SELERLLREDEEMVERVERVLKELEEEVRKALKRAKEMHRRLLERLKTILDELERKEPREDLLRELETLAEEIKRILEELNKELRKLLREIEEELKRLLKEHKELSDRIKKILEEKVDDKEKVKELERRSRKTHKELADKADTLRKRLEEVIKESEDVTEELERRLKKLIDDLRRSVT

SEQ ID NO: 12435 - protein, 178 aa, Artificial Sequence; identical to SEQ ID NO: 12434
  Synthetic

SEQ ID NO: 12436 - protein, 178 aa, Artificial Sequence
  Synthetic
SELEKLLRELEELLKELKRVLEELIERDKRLLDRLKEVHERLLRRLEKLLKELKDKEPREDLLRRLKELIDKIREDAERLNEEHRRLVEEVKKELDRLLRELEDLLRRIEDILRKRVDDEDKVREAKRELERLIEELRRAVRRVEDESRRSHEESKKVTDDLDKRARELLEELRETIR

SEQ ID NO: 12437 - protein, 178 aa, Artificial Sequence; identical to SEQ ID NO: 12436
  Synthetic

SEQ ID NO: 12438 - protein, 179 aa, Artificial Sequence
  Synthetic
REVEELEKDVRRTLDELRKRHRDNNERIKKILRELEDLHRRNNERTKTLLARIRELRERGGEDKERMVKTVEDILRESTRHSERVIRESERLLEEAKRHSEEVARRSKEVLKELEDKVRESRVPRELERKLKELVKDVEKVIEDDDRSADKLLTKVKRDADEDRKSNEKLVREVREELR

SEQ ID NO: 12439 - protein, 179 aa, Artificial Sequence; identical to SEQ ID NO: 12438
  Synthetic

SEQ ID NO: 12440 - protein, 179 aa, Artificial Sequence
  Synthetic
SEAEEVLKRVEEVVERLKKLHDDNNKKLRDAVRRLKRLHTEHNKETKEIKKEIEDLIRKGGEEKEKLVERVERLVKRSTDTLREVVRRTEKLLKEVEDHSRRVIEESKELVKEMEKRLRETDVSREVEKRLKEVVKRIDEVAEEDERSIREILRELRKVIEDDERSNRKVAKEIRESAK

SEQ ID NO: 12441 - protein, 179 aa, Artificial Sequence; identical to SEQ ID NO: 12440
  Synthetic

SEQ ID NO: 12442 - protein, 179 aa, Artificial Sequence
  Synthetic
DKVREVLERLKKLVEDLKRLHKRNNEEVRRVIEEIKDRSRRNNKRTEDILRDIEREIRRGGERKEELVKRVKELLEDSTRHSEEVVREVEEILREVKRHSEEVVKESERILREAKKRLDESDVDERIKEELKKLVEDVRRTAEDDRRTIEDLVRKVEEVLERDRKSNEEAARDVDRKLK

SEQ ID NO: 12443 - protein, 179 aa, Artificial Sequence; identical to SEQ ID NO: 12442
  Synthetic

SEQ ID NO: 12444 - protein, 181 aa, Artificial Sequence
  Synthetic
RSVEEVKKELDDSDRRDREVVKEARRRLEESKDRLRKIIERAKEELDKSDERIKKNGVSEELLRRLKEVSEEHRRELERLLRRLKEVTDEHTKAIKKIHEETKKVSDDHRRAVEELRKRGGVDEELKKLLKHNREVLEDSRRKIEELLRTNEKALEDVKRAIEELLKHNEEVLKEVDDRTR

SEQ ID NO: 12445 - protein, 181 aa, Artificial Sequence; identical to SEQ ID NO: 12444
  Synthetic

SEQ ID NO: 12446 - protein, 181 aa, Artificial Sequence
  Synthetic
KEVEDAEKRLRDLLKEDRELIERLRRALEESLKEDRKVIKELREELDKSDRKVEEDGVDERLLTELRKASEEHRRKLDEIHERTREETERHKERLDKIHEDTERVARELKKRIDELKKRGGRREDIKRLLEELEEVLRRSEKKLRELLDTNRKILEESKERLRRLLEHNKRVLRRVVEETR

SEQ ID NO: 12447 - protein, 181 aa, Artificial Sequence; identical to SEQ ID NO: 12446
  Synthetic

SEQ ID NO: 12448 - protein, 181 aa, Artificial Sequence
  Synthetic
SDEERVEKELKKSDDEDKKLIDELTRRLRESLKRLEEEVRRAREELDKSDEEVRKAGVSEELLTRLEKMSREHKKRIDDLLRRAKEVTERHERKLEEIHKRTKDMSDDHRRKIEDLRAKGGVREDIERLLDHNRKVLEKSADDLRKLLKTNEEILRRVAKAIRDLLEHNRRVVEEVKERAR

SEQ ID NO: 12449 - protein, 181 aa, Artificial Sequence; identical to SEQ ID NO: 12448
  Synthetic

SEQ ID NO: 12450 - protein, 181 aa, Artificial Sequence
  Synthetic
SEVEEAKRRLDESDKDDRRVIDKLRKELEKSREEAKRLIDRLREELKDSNREAEEAGIDEDLLRKLRKATDEHRRKIEDLLRELDRVTKEHKERIDKIHEETKEMSKRHKDELEKLRARGGSREDLRRLLEHNKEVLERSKKRLEELSETNKKFLEEVKDALRELLKTNREVLREVKERTK

SEQ ID NO: 12451 - protein, 181 aa, Artificial Sequence; identical to SEQ ID NO: 12450
  Synthetic

SEQ ID NO: 12452 - protein, 181 aa, Artificial Sequence
  Synthetic
SSVERAKRELDKSLKEDRDTIRDLKRRLEESRKRDREVIEELKKILKKLLDEVKDSGISKDLLKRIEDAVRTIEEELKRIHDDTERMTREHKERIERIHDRTKKVSDEHKKTIEDLKRKGGDDDKIKKLLDHNRKVLEDSKEELRRLLETNKRILEESKKRLDRLAEEIEKVARTVKEEAR

SEQ ID NO: 12453 - protein, 181 aa, Artificial Sequence; identical to SEQ ID NO: 12452
  Synthetic

SEQ ID NO: 12454 - protein, 181 aa, Artificial Sequence
  Synthetic
DEVERAEEELRKSDEEDRRVVKRATETLKKSKDELEREIKRLEDELERSNREVEERGVDKSLLEELEKVTRDHKKRLRDLLETVRRLTEDHLEKIKKIHEDTKRASEEHLKAIRELERRGGVREEIKKLLDHNRRVLEESERRIRELLRTNREVLERVKKELDELLEHNRRVLEEVEKRVR

SEQ ID NO: 12455 - protein, 181 aa, Artificial Sequence; identical to SEQ ID NO: 12454
  Synthetic

SEQ ID NO: 12456 - protein, 181 aa, Artificial Sequence
  Synthetic
SSVEKAKKRLDESDKTDRDVIKRLREELKKSEDTDRELVKKVKEEIEKVEEELRRRGIDESLLTELKRVAEEVKETIDDIHRKTKRVTEEHTKAADKIHEETKRASKEHKERIEELRKRGGDDDKIRRLLEHNEEVMKRSKERLDDLVRTNRKILEESKRKIEKLLKELREVVEEVDRRAR

SEQ ID NO: 12457 - protein, 181 aa, Artificial Sequence; identical to SEQ ID NO: 12456
  Synthetic

SEQ ID NO: 12458 - protein, 178 aa, Artificial Sequence
  Synthetic
DKAERVREEIEKLERELRRVLKESREHTKKLEEDLERVLRRSREATKKLKEDLERNNLPDEARKRADEILKRNEDLLRRIKKTMRDVLEENERLLDKIERDLREAIKRLEEVLRDKKDDGELIKRMLEELKRLLEELEKRIRDSNAELEKLLRDLIRKLERSLREIKRVLEELKEEAR

SEQ ID NO: 12459 - protein, 178 aa, Artificial Sequence; identical to SEQ ID NO: 12458
  Synthetic

SEQ ID NO: 12460 - protein, 184 aa, Artificial Sequence
  Synthetic
SEVETLMREIKKLIDDIKRKNEDSNREIREVSRKTEEDLRDLLRKAREVAEKLKDELRRRKDKDVVERVRRLVDELRRRMEDLVRKVKEINDRLRRLVEELVKDSERLARDLERRVRSLARKIDDEEKVKRLEDSLERLKRDLRKIIKENEDELRKINRRNEELIKKAEEDLRRLSEDLKRAEK

SEQ ID NO: 12461 - protein, 184 aa, Artificial Sequence; identical to SEQ ID NO: 12460
  Synthetic

SEQ ID NO: 12462 - protein, 180 aa, Artificial Sequence
  Synthetic
SELEEVLRRIEKLVRKAHKENEDVLREIERLVRTAHRLNKKVDDDSAKIAEDLKREKREDKDKVEEMLRRLRELYRRLEEENRRILREIEELVKELEKRNREILKELEDLVKDAERKDKDGTERVRRLKEILERLKEEVRRSLEELRKEVERLKKEVEDSLRELKKSLEEWVKDLEEATR

SEQ ID NO: 12463 - protein, 180 aa, Artificial Sequence; identical to SEQ ID NO: 12462
  Synthetic

SEQ ID NO: 12464 - protein, 180 aa, Artificial Sequence
  Synthetic
SDLEAVLDEIKKLAEEAHKRNEEVDKESAKLVKEAHKVNEDVDKESAEIVKRIDEEKKEDRDKVRTMIRELKKKYEDVARRNKKILDELEEKYDRLRKDNDRILDEIRRKVEDVERKDKDGTERVKRLKDELRRLLKEVKDSLEELDRMLEEWKERVRRSLEELRKRAKEWEDKLRESLR

SEQ ID NO: 12465 - protein, 180 aa, Artificial Sequence; identical to SEQ ID NO: 12464
  Synthetic

SEQ ID NO: 12466 - protein, 180 aa, Artificial Sequence
  Synthetic
SELEDVLKKIRKLVRDAHEENKRVLEEIRKTVDEIRKELEDVDTKSAEIAERAKERKKDDKDKVRRLLEELEKLYRRLIEKVEDILRRIEEKVRDVERRNREILERLRELVERLAKEDKDGKERVERLRRELEKLVREVEESLKRLKEELDKIKEELRRILEELEEKLRRWSRELKETAR

SEQ ID NO: 12467 - protein, 180 aa, Artificial Sequence; identical to SEQ ID NO: 12466
  Synthetic

SEQ ID NO: 12468 - protein, 180 aa, Artificial Sequence
  Synthetic
SELEKVVEDLRRIVEEIERRLREVIKEIRELVRRAHERNKDVDRKSAEIVKDIEEKKKEDKDKVREMVRRLEELYRKLVEENEDILRRIEKKVRDAVETVERLIKEMRKIVEKVARDDKDGTERVERLKRALDELERRLKELVRELEDSLKKLADEVKRSLEELDKSLKDWKKKLDDELK

SEQ ID NO: 12469 - protein, 180 aa, Artificial Sequence; identical to SEQ ID NO: 12468
  Synthetic

SEQ ID NO: 12470 - protein, 180 aa, Artificial Sequence
  Synthetic
SEIERVLEEIKERVERADRKNEKVDRESAEKVKELHRRNEEVDRESAETVKRAERDKKDDRDKLRDVLRRLEERYKRLEDENKRLLKELRERYERLKKENKDILKKIRDDLRELARRDKDGTDKVREIRERVERLVKAVDESLERLERSLEEWARRLDKSLEDLKRSLKRWKEELDRKAQ

SEQ ID NO: 12471 - protein, 180 aa, Artificial Sequence; identical to SEQ ID NO: 12470
  Synthetic

SEQ ID NO: 12472 - protein, 180 aa, Artificial Sequence
  Synthetic
SELETLIKEATDLAEEVKEDLRRVDEESAKLVEDADDENKRVDEESAKIVEDLKREKKDDDEKVRRVLKELEDKYRRLAERNKRILDELDKLYKELAKRVKEVLDRIREKVKDVEREDKDGTERIRDLKEKVRRLMEDVKRLLEELERSLERWKEKVRDSLEKLKKSLEEWAKELKDTSK

SEQ ID NO: 12473 - protein, 180 aa, Artificial Sequence; identical to SEQ ID NO: 12472
  Synthetic

SEQ ID NO: 12474 - protein, 180 aa, Artificial Sequence
  Synthetic
KDLETVLEEIKRIVDDLDRRNKEVDKESAKLVKEADEKNKRVDEESAKIVKRLEREKKDDKDKVTEARRRLERTYREVDKDNKRILDELRRRYEELERRNEELLREIREKVERAAKKDKDGTDRVRRLREEVTKLLDEVRRSLDRLRESLKEWKERVDDSLRRLRDSLRKWKRKLEEATR

SEQ ID NO: 12475 - protein, 180 aa, Artificial Sequence; identical to SEQ ID NO: 12474
  Synthetic

SEQ ID NO: 12476 - protein, 180 aa, Artificial Sequence
  Synthetic
SELDDLLRRIRELVRRAEEDLKRVNEESARLVEEMDKDNKRVDEESAKIAEDLKREKKEDRDKVREVLKRLEDKYRELARRNKKILDELRKKYEDLIKKVRDIIREIDKRVKEVKDEDKDGTKKIEELKREVKKIADELERILKELEDSLREWSERVRKSLEELKDSLRRWAEELKRDLK

SEQ ID NO: 12477 - protein, 180 aa, Artificial Sequence; identical to SEQ ID NO: 12476
  Synthetic

SEQ ID NO: 12478 - protein, 180 aa, Artificial Sequence
  Synthetic
KDLERVVKEIERLVREAEKKIREVNDRSAKLARDLDRRNREVLKEIKKIAEDLEREKKEDEKAVRDLLREIRKKVEDVKETNERILRKLRKEYEELRREVKKILEEIEKLVRDVERKDKDGKERVERLKRELERLKRELEETLKRLDEELEKWEERVRESLKRLEDRVREILKRLEDDAR

SEQ ID NO: 12479 - protein, 180 aa, Artificial Sequence; identical to SEQ ID NO: 12478
  Synthetic

SEQ ID NO: 12480 - protein, 180 aa, Artificial Sequence
  Synthetic
DELETVMKRIRELAKELNKKNKDVLDEIEDLVRKADKRNKEVLKRIEEILREARKRKKDDKDRVREVLEEIKREVKKLERENEEILKRIEDTLRELERDNERILEEIRRLVEDAERKDKDGTERVKRLKDELRRLIEEVRRNLKRLKEEVDKIRERVRRSLKKLKEDVKRLSDEVKETLK

SEQ ID NO: 12481 - protein, 180 aa, Artificial Sequence; identical to SEQ ID NO: 12480
  Synthetic

SEQ ID NO: 12482 - protein, 182 aa, Artificial Sequence
  Synthetic
KEIEDLLRELRELVKEIDDLIKDATREIERLVKEVHDKNEKVTRRLEKLMRELREVARRGDLRDDDIRKAIREMEELSKEVEDTNRKVIEDLRRLSERLEEEVRKLIRRAEELVADIARKRGRDERIETLERALRELVRELEEKVDEHRKRTDKVARDLKKSVDDHRRRTEELVRELRKTEE

SEQ ID NO: 12483 - protein, 182 aa, Artificial Sequence; identical to SEQ ID NO: 12482
  Synthetic

SEQ ID NO: 12484 - protein, 182 aa, Artificial Sequence
  Synthetic
SELEDVLRRAKKLVEDVHRDNKRVTEELEKLARELHKKNEDVLRELKKLADDLREMLKRGDLREEDIKRVRTEIRKLLEDVRETNKRLIERIKDLSERVREINEEVIKEMEELLEDLRRRDGDDEKVKRLEEEIRRLARELRESVRRHKERTEELVERLKESLKKLEEDIRRLEKELEDDRR

SEQ ID NO: 12485 - protein, 182 aa, Artificial Sequence; identical to SEQ ID NO: 12484
  Synthetic

SEQ ID NO: 12486 - protein, 182 aa, Artificial Sequence
  Synthetic
SDLDDVLRRIRELAKRVHDENKRVTEELERLVEELEKKARELLRRIEELVRTLKEMRERGDARREEIEKVIEDIERLVRKIEDLIRKLIERARRLSEEVEDINRRVIEELRELVRELERRTGEDERVERLRRELEKLVKELEESVRRHKKRTRELEERLKDVLRELEDAVRRLVEELEKTDE

SEQ ID NO: 12487 - protein, 182 aa, Artificial Sequence; identical to SEQ ID NO: 12486
  Synthetic

SEQ ID NO: 12488 - protein, 182 aa, Artificial Sequence
  Synthetic
EEIERLLEEIKRLVETVHESNRRVLKELRDLAEELKRRNTKSNRDMERLVEELEEMRRRGDAREEVIRRVIEELKELLDRLHKDNRDAEREVERLVREVKRENDDVIRRIEELVEDLRRKRGEDEKVKTARDEVRRLVEELKESVERLARELKKLVDELRKVDEDNKRRLEELERRLRESTR

SEQ ID NO: 12489 - protein, 182 aa, Artificial Sequence; identical to SEQ ID NO: 12488
  Synthetic

SEQ ID NO: 12490 - protein, 182 aa, Artificial Sequence
  Synthetic
SELEDVLRKLEKLAREVDKINKDLIKRVEELARELKKKNEKSNKEARDLVKKLKEMKDRGDLRREDIDRVEKRLEKLLKELHEENKRVIDEIRKLLEEAEETNRRVIEEIKKLVKELEDRDGDDERVRRLKKEVEELERRLRRSVDDLRRKIKELEDRLREIDERNKREIEKLVKELRDTDR

SEQ ID NO: 12491 - protein, 182 aa, Artificial Sequence; identical to SEQ ID NO: 12490
  Synthetic

SEQ ID NO: 12492 - protein, 182 aa, Artificial Sequence
  Synthetic
DELETVAKLLEDLSRTNEDRLREVKETLKRLADTVDKINKEVLRRLRELAKRLKELKERGDLREEKIERVKEELERLVDKVRKENKEVDDEVRRLVDEVRKHSKRVIEELRKLVDDLRRRRGEDEDVRRLEEELRKLEERNRRLVRELEEVLKKLKDELKKSVDRLKEELDRLVKELDEIKK

SEQ ID NO: 12493 - protein, 182 aa, Artificial Sequence; identical to SEQ ID NO: 12492
  Synthetic

SEQ ID NO: 12494 - protein, 182 aa, Artificial Sequence
  Synthetic
SEIEDALRKMEKLAEDVNRKNEEVIREVRRLSEENKKKLDDVLETLKKLVRELAEMTKRGDIREEDIKRVIREAERLVKELDDHSKEVIKEIKERLRRVEEENKRVIDEIKKLVKEIVDKEGRDERIRTLEKAVRDLVRELEESVDRLRREADRLVEENERVVERLKRELKRLVEELERRAK

SEQ ID NO: 12495 - protein, 182 aa, Artificial Sequence; identical to SEQ ID NO: 12494
  Synthetic

SEQ ID NO: 12496 - protein, 182 aa, Artificial Sequence
  Synthetic
DELREVLERVKRLVDTVNKINDDLTKRNEDLSRKNVDKIRRLTEEIERLVEEVDRARREGRLREREIEKVIRRSKKLSEDLKKHSEDVIRESDELLKDAERVNREVIKEIEELVRDLERRRGRDEDVRRLEEEVRKLVEELRRSVEDHKRRNKESVDRNRRAVEEHERRNREVVERLERKAK

SEQ ID NO: 12497 - protein, 182 aa, Artificial Sequence; identical to SEQ ID NO: 12496
  Synthetic

SEQ ID NO: 12498 - protein, 182 aa, Artificial Sequence
  Synthetic
SDIEEALKTMEELSRRNEETLRRVLKRLKELADEVNRKNERVLEEAKELADRLRELRERGDLRKEDIDRVIREIERLVKEVADTNKKVIEEVKRLVERLEEHSREVIRRLEELLRDIRRKKGDDERIKTLEEDLRRLVEENKKVVEELKRRLKKLVDELRESLKELEKAVRKLVKELRDDEK

SEQ ID NO: 12499 - protein, 182 aa, Artificial Sequence; identical to SEQ ID NO: 12498
  Synthetic

SEQ ID NO: 12500 - protein, 177 aa, Artificial Sequence
  Synthetic
SSKETVAKRVEDVKRELEEVLKELARESKRLSDRDKKLNEEAAEEIERLKDELRKKVRDKDTLEEVLRRLEELLRRLNEHSRDVIRRSEDSLRKAADFVRRLKETADKLLEELKRVDDDEVLERIVKRVRDLVEEIKRRLEKLAEDNRRLSKRNEDVIRTLLEEARKLVEKVKEEVR

SEQ ID NO: 12501 - protein, 177 aa, Artificial Sequence; identical to SEQ ID NO: 12500
  Synthetic

SEQ ID NO: 12502 - protein, 177 aa, Artificial Sequence
  Synthetic
RSKEEVAKEIKRLKEENKRLLDELAKRSEELERRDRRLNEEHHREIRRLTDELRKKVRDEDTLREVEERVRKIDEDVNRHSEEVIRESRESLKRVADHSRKVVEDLERLLEEAKRVDDDRVLKEIVDEARRLSERNEEVLRRLLKENEDLSKRNEDFIRKTMKELRDLAEEVKERAK

SEQ ID NO: 12503 - protein, 177 aa, Artificial Sequence; identical to SEQ ID NO: 12502
  Synthetic

SEQ ID NO: 12504 - protein, 177 aa, Artificial Sequence
  Synthetic
KSKEDVKREIERLKKENREVLDTARKRIEDLIREDERVNREAAEEIKRLVEELERRVRDREELRKVTEELKKLLEDLNRHSEEVIRTLRKLLDDLRKHSEEVERRLEKLLEELKRVEDDRVLKEIVEELRRLSEENKRRIERALEELEKLSKDNTDRIEEAREDLRRLVRELLEKEQ

SEQ ID NO: 12505 - protein, 177 aa, Artificial Sequence; identical to SEQ ID NO: 12504
  Synthetic

SEQ ID NO: 12506 - protein, 177 aa, Artificial Sequence
  Synthetic
KDEEEVAKEIERLKEENDRVLKEAADKIEKLKKENREVNTRAAEEIERLKKELREKVRDKDLLRKLEEELRRLLEELKEHSERVERELEKLLEDLARHSEDVKRRLDEILEELKRVRDSRVLEEVVRRLRKLSEENKKRIKEMLDDVERLSRRNEEKIRRVLEDARRLLEDLTRKAK

SEQ ID NO: 12507 - protein, 177 aa, Artificial Sequence; identical to SEQ ID NO: 12506
  Synthetic

SEQ ID NO: 12508 - protein, 177 aa, Artificial Sequence
  Synthetic
SEKETVAEEIRRLIEKNKKMLEDHTRDIRRLEKENDDVNRKHHEDIRRLKDRLRKEVRSEETLRDLTKKVEEIDEEIKRHSEEIKRRLREINKELKEHSDRVVERLRKLLEDAKRVDDSRVLKEIVDEARELSKRNEDKIRKSLEELKRLSERNKKKIEDTLKELRKLAEEVKRRAT

SEQ ID NO: 12509 - protein, 177 aa, Artificial Sequence; identical to SEQ ID NO: 12508
  Synthetic

SEQ ID NO: 12510 - protein, 177 aa, Artificial Sequence
  Synthetic
SEKERVADDIRKLEEENKEVLDRAAEEIKRLKKRDRELNKRHHKTIRDLVDELEKKVRDEETLRRVKERMREIDERVKESSKRVEDELEKLLEELKRHSEEVVRRLRELLERLKRVDDSRVLDEIVKEARDLSEENRKLIEEALERLRRLSRENEETIKKTMEELKRLVEEVKERAR

SEQ ID NO: 12511 - protein, 177 aa, Artificial Sequence; identical to SEQ ID NO: 12510
  Synthetic

SEQ ID NO: 12512 - protein, 177 aa, Artificial Sequence
  Synthetic
KSKEEVADKIRKLKEENRKVLERHTREIEKLKRDDEEANKKHHEDVKEVMKRLEKEVRDKDTLEKVKREAKKIDEDLRKSSEEVMRTLDEINKDVARHSKEVAERLEELLERLKRVDDDRVLEEIVREAEELSKRNKDRIDESLKELRKLSEDNKREIERTLEEIKRLAEEVRRRDT

SEQ ID NO: 12513 - protein, 177 aa, Artificial Sequence; identical to SEQ ID NO: 12512
  Synthetic

SEQ ID NO: 12514 - protein, 177 aa, Artificial Sequence
  Synthetic
SSKERLKEMIDRLKERNKDLLRKAAEEIKRLEDEDREVNRRHHEEIERLKKELREKVRDKDTLKELEERVEKIDEDVKRNSKRVVETLRELLKRLADHSKRVLEELDRLLEELKRVDDDRALDEIIKEAKKLSDDNERLIRDVLRRARDLSRRNKETIRRTLEKLKREAEKVKEDAR

SEQ ID NO: 12515 - protein, 177 aa, Artificial Sequence; identical to SEQ ID NO: 12514
  Synthetic

SEQ ID NO: 12516 - protein, 185 aa, Artificial Sequence
  Synthetic
SDADRIIEEARRLSEENKRRIEEVLKRNRKLSKENHDKNDELLKRVRELLRRVVERLRREEGREEIKKLVEELEKELDKILEESRRSTEEVKDESRRLLEEIRRSTKEVKKTLDDLLRKVRERVRDKDKLKRLEDEVRKLTDENRRVTEKAERDLRRSNRENDRSTERLEEEIRRIKKRLRDEAR

SEQ ID NO: 12517 - protein, 185 aa, Artificial Sequence; identical to SEQ ID NO: 12516
  Synthetic

SEQ ID NO: 12518 - protein, 185 aa, Artificial Sequence
  Synthetic
REAEDLIRRLRELVRRHHELNRKLAEELRKLSEENKRKIEKVTREVEKLVKDVADTLKDDRGDERLERLVKELKDRLDELVKEIERSTREVERRMREVLKRSRDSAREVEERVERLLEEVRRRVRDKDKLKRLEEELERLKEEVRKSNRDLEKEVRDLRKENEKVTEEVKKRIEDLKRKLDEDRR

SEQ ID NO: 12519 - protein, 185 aa, Artificial Sequence; identical to SEQ ID NO: 12518
  Synthetic

SEQ ID NO: 12520 - protein, 185 aa, Artificial Sequence
  Synthetic
SEVDKIIKDARDLLKEHHEKNKRLIEENRRLSEENKDRIRRALEKLKKLVDDLRRLIEEVDDRDTLRELVRRVERTLDELLKDIERSTDEVRRESERLLEESRRSAEEVKRRLDELLKEVRRRVRDKKKLDELETEVRRIKETIDRSNERLERELEKSNRENKKVTDDAREVVKKLKEEIKRDED

SEQ ID NO: 12521 - protein, 185 aa, Artificial Sequence; identical to SEQ ID NO: 12520
  Synthetic

SEQ ID NO: 12522 - protein, 185 aa, Artificial Sequence
  Synthetic
SEADEIIKEAKKLADDHHRLNKEIIERNKRLSEENHKLNEKIIEDVRRLVKDVAERLKRDEDRRDLDRLVDEVREELRRLLEESERSTEDVKRESKRLLDESKKSAEDVKRDLDRLLKEVEEKVRDKEKLDRLREKVEEIKRRVDKSNDELRRSMEESNKRNDESTDRLREELRRLDEELDRRRK

SEQ ID NO: 12523 - protein, 185 aa, Artificial Sequence; identical to SEQ ID NO: 12522
  Synthetic

SEQ ID NO: 12524 - protein, 185 aa, Artificial Sequence
  Synthetic
SDLERVLKELRELVRRHHELNKDIIRRARRLSEENEKDIKKLLDDARKLLEEVKRTLDRMEGKEEVDKLIEELERRLDKLTKRLEDSSRDVKRRLRELLKRSEESAREVKKTIRKLEKELTERVRDKKKLDEARTELRKLEEEVDKSNKELRDEVEKLERRNDELLERAREEVERLKEELRRKAT

SEQ ID NO: 12525 - protein, 185 aa, Artificial Sequence; identical to SEQ ID NO: 12524
  Synthetic

SEQ ID NO: 12526 - protein, 185 aa, Artificial Sequence
  Synthetic
SKAERIIEEVRRLSEDNKRRIKKLLDEAKELLDRHHKRNKELLEEIERLLREVKERLKKDRGRDRIRRLVEEAKKRLDEVLEDSKRSARELKKTLDELLKRLEKSSEDVERRLRKLEDDVRREVRDKDRLEELRRDLERLRKENKDVLDRVREDIKRLKEELDDSNRRLKDTIEDLKRELDEEAR

SEQ ID NO: 12527 - protein, 185 aa, Artificial Sequence; identical to SEQ ID NO: 12526
  Synthetic

SEQ ID NO: 12528 - protein, 184 aa, Artificial Sequence
  Synthetic
SEVEELVKDLKRILDEIKRTNDELNKELKRLSDESRKLSKENIDRLRRILEEIEKTIRRRKTEEVKRRIEELVERMRRSSEEVVRRIEKLNEEANRKVEKVKRENKELLERAERKVREVAKRIKDEEKVRKLEKLLEDIKRTVDKIIRESEKRAEEINRDNRRIIEENKKKLEEIARRVEELAR

SEQ ID NO: 12529 - protein, 184 aa, Artificial Sequence; identical to SEQ ID NO: 12528
  Synthetic

SEQ ID NO: 12530 - protein, 182 aa, Artificial Sequence
  Synthetic
SSIEELAKRLEDLIRELRDRHRRLNEELKELTDRNRKEIEEANERIKRLIDDLERLRRRGDIDEKRIREIIKRIRELSKEIEKRSEKIIRELERLVEELAKETEDIIRRARELVEAIRKERGDNEEIDKLRRELERLEEELKKVLDRTREELERLVRDNRRLNKEHKDHSDTLVRRLEESRK

SEQ ID NO: 12531 - protein, 182 aa, Artificial Sequence; identical to SEQ ID NO: 12530
  Synthetic

SEQ ID NO: 12532 - protein, 186 aa, Artificial Sequence
  Synthetic
SEVEDLIRDLERLLKEHDELNKRSMEELEKLLKDLEKMVRDSLREAREIAERVKETIKRTSDKEDLRRRLKKVKDDLDESHKDLARLLKEIEERIDRILRENERHLEEIKREIKKILEELERAKKGEEKKLDEARKVLEEIKKRLEDSLRRLREEAERIKRELKRILDEHRKEIERIKKEIDEAAR

SEQ ID NO: 12533 - protein, 186 aa, Artificial Sequence; identical to SEQ ID NO: 12532
  Synthetic

SEQ ID NO: 12534 - protein, 186 aa, Artificial Sequence
  Synthetic
SEIEKVLRDVEKLVREHEDLNKKSAEEAERLTRDNKRRVDESKKRIREILKEVDEIIRRTERKEDLERKLTEVRRRIDKSHKELKEHSDEVVKRLKEILDRNAEHLEEIERRIDKILDDVRKRKQGDDKDLRRLAEEAERIKKRLRDSLDELRKIIEELEERNRRINEDHRRDLEDVKRRIEEKSK

SEQ ID NO: 12535 - protein, 186 aa, Artificial Sequence; identical to SEQ ID NO: 12534
  Synthetic

SEQ ID NO: 12536 - protein, 186 aa, Artificial Sequence
  Synthetic
SEIEEVARRAEKLTKENEELIRRSLRDIERLVKEMEDIVRKSLKEIKELVERLKDISRKTSRKEDLRRIIEDIKRKIEESHKRLAELLRDIVRKIRESHERVNKHSKEVMERLDRLLEEVEKAKKGEDEKLRRLAKRIEELKKRNEDLNREHRKRLEEAEKRLKDVLDEHRRRLEEVKKELDEEAK

SEQ ID NO: 12537 - protein, 186 aa, Artificial Sequence; identical to SEQ ID NO: 12536
  Synthetic

SEQ ID NO: 12538 - protein, 186 aa, Artificial Sequence
  Synthetic
DEIERVLEEIKKLTDDNRKLVKESIDRAEELLKRHEEENKKSVERARKLVRDLDEIRRKTDRKEDLRRIIKEVREELKKILKENADHAREIMRRLEESHKRLNEHSKRVVEEIRRLLEEVKKAKKGDKKKLDELARRAEDMERDNKRINKEHRERIKEIKERIKESLDRLAEEIKKIEKELEDKAR

SEQ ID NO: 12539 - protein, 186 aa, Artificial Sequence; identical to SEQ ID NO: 12538
  Synthetic

SEQ ID NO: 12540 - protein, 186 aa, Artificial Sequence
  Synthetic
SEIEKVLEDAKKLTKENEDLIRKSLEDNERLLRRHEEENKKSAEDMRDLLRRLEDIIRKTSRKEDLERIIREVIETIRRILKRNAEHAEEVIERSRRSHEEVNRHSKEVIDTLRKLLEEVREAKRGSEELLERLAREIKKLIDKNRKLNEDHRRESEKSERRLRESLRKLAEEAERIEREMDKSRK

SEQ ID NO: 12541 - protein, 186 aa, Artificial Sequence; identical to SEQ ID NO: 12540
  Synthetic

SEQ ID NO: 12542 - protein, 184 aa, Artificial Sequence
  Synthetic
SKIEKIVRDAERLLDELRKLAEDVLRRLEELNRRAEDVIRRLAEENTELLKRLEDLLETEKTADEKLKRAVEKLEKASEESVDRLRRLIEELKKEHKRLLEELERVVKKVDDDLKRLTKEIEGTDKKKAEELKRKAEEIKRRIDKIVDEVRKAIRDSAEHLKRLLEEYRRRVEEVKKRVRDAAK

SEQ ID NO: 12543 - protein, 184 aa, Artificial Sequence; identical to SEQ ID NO: 12542
  Synthetic

SEQ ID NO: 12544 - protein, 190 aa, Artificial Sequence
  Synthetic
DELERLREEVKRLSEENKELIKEMEKRNRELSKENEKVNRELKKRVDDIIRTLKELRKEGRDEETLTRMLDRVRKELKRLKEENKKILEDLRRRSEELARRLERADEELKKRLEDLARDLKRKLKDGDEKEEREIRRVLEDIKRIADENERENREALKRLEETNKRNTDHNRDVLREIDKLFREVAEELR

SEQ ID NO: 12545 - protein, 190 aa, Artificial Sequence; identical to SEQ ID NO: 12544
  Synthetic

SEQ ID NO: 12546 - protein, 180 aa, Artificial Sequence
  Synthetic
SEKEEVIKRIREELKENEKENRDVIRKIRELLDELRRRVEEVLRRLKKSNEDIEREAEKKPRTEELKKLLDEVKERSKELTERLREALKEAAKVVERVVEEIKRINDELRKRIERLEEKLDEVREEELKERIKKLSKENKDRVRRMLERIKKLVDDLRRLLEELRRRNEKLLDRLRKAIK

SEQ ID NO: 12547 - protein, 180 aa, Artificial Sequence; identical to SEQ ID NO: 12546
  Synthetic

SEQ ID NO: 12548 - protein, 180 aa, Artificial Sequence
  Synthetic
KDEEKVIEDIRRILEENHRENKEVIDKIRELLRRNEEENKEAIRRMRKSNKEITDRAEEKPQTEDLRRLIKEAKDESDKIIRRLEELNKRLRDAVRELEKKIKEINKELKRRIEELERRLDKIRREELERRVRELSKENKEMLKRVEDKIRELSERNKRTVKKVREDNERLIRRLEEEDK

SEQ ID NO: 12549 - protein, 180 aa, Artificial Sequence; identical to SEQ ID NO: 12548
  Synthetic

SEQ ID NO: 12550 - protein, 188 aa, Artificial Sequence
  Synthetic
SELERIEEDVERLNRRNEETLKRIDEALKRLEKSNKELDEKLEETVKRIKDRVERVKRRNVDEEDLRRLDEEIERTLRELKKELDEHLRRVEDTLRRLKTESRRLLKEIKDRLEEIEKEEADGNLPDKAKREVDKVRTDAREILKENKRRNEDVIRKIEEKVRDLERRNRDLLRRVKTKIDRLREELK

SEQ ID NO: 12551 - protein, 188 aa, Artificial Sequence; identical to SEQ ID NO: 12550
  Synthetic

SEQ ID NO: 12552 - protein, 186 aa, Artificial Sequence
  Synthetic
KELEDIARRVDELNKRNEELIKDAKRVLKEASDKNKEMNERVDDKLRRLAKKVKELTGTSEEMVERLKRELETVKEKIRKESREILEELKEVLKDLERRMRKLEEENKTVLREIEERLRKRNGGKEERDKIRDLLRRIREKIEKNRKDAEDVLREIKKLIDENKKRNEEVLKKIEELLRELEKRLE

SEQ ID NO: 12553 - protein, 186 aa, Artificial Sequence; identical to SEQ ID NO: 12552
  Synthetic

SEQ ID NO: 12554 - protein, 182 aa, Artificial Sequence
  Synthetic
SRLEKVIKEIKKTHEELERRFKKNSDEAEESLKRLEDELRKVVTDIERKLRDLERRVREAGRRREELEKLAEDLKETIERLRKEVKELMDRHRDVNREIEERLRRLARENEERLRKADEKPRSEELITRLKKHVDDTAREVEELIKRHTEHNEKLRRDIKKLLEELKRKVDELRKEIETRTR

SEQ ID NO: 12555 - protein, 182 aa, Artificial Sequence; identical to SEQ ID NO: 12554
  Synthetic

SEQ ID NO: 12556 - protein, 181 aa, Artificial Sequence
  Synthetic
SELEELIKRAEDTIRRLEREIDELIERHRRSAERLRETLKELIDRHRKSIEDVMRELKRRRGRVPDEVKRTLEKSKRDLDRLAEELEKTLKESEEELKRLKDRLKETLDKLREDLKELAKRGRTGKEEIERLIKELEKKIKEVVKRIRDIDEDLKRKAKKVVDDLRELNERLERKAKEATK

SEQ ID NO: 12557 - protein, 181 aa, Artificial Sequence; identical to SEQ ID NO: 12556
  Synthetic

SEQ ID NO: 12558 - protein, 185 aa, Artificial Sequence
  Synthetic
SEEERLRDHSRRVEELARRAAEKLRRHSEDVKRLITELIKLIEDVMKKIEDEVRDAEKRGDTDETLVKRIEELVTRLEKTLRDMTREIRRSHKELEDTVRRLVEELKRSNKELKKEIDEGDLRDELKKRIDELHKRNKDKLDEISERLKRLLEENRKLIKEVEERLRKLLEDLRKLIEDVKRRLR

SEQ ID NO: 12559 - protein, 185 aa, Artificial Sequence; identical to SEQ ID NO: 12558
  Synthetic

SEQ ID NO: 12560 - protein, 185 aa, Artificial Sequence
  Synthetic
DFEEEIRRNLKRVRDLAKKLEDLIRKHSEEVKRLAEEVKREIEEVIKRAKKKMEDVRRDGDNDETLLRELERTLRELERKLRELSERLRRSNEKLKRDLKRVRDDLKRSHDDLERRIREGDLRDELKKRADRLLDEHREELKRIEDRLRELLERNNRLLEDIDRRLKELLEDLRRVLKEIEEELR

SEQ ID NO: 12561 - protein, 185 aa, Artificial Sequence; identical to SEQ ID NO: 12560
  Synthetic

SEQ ID NO: 12562 - protein, 186 aa, Artificial Sequence
  Synthetic
SEVERLLEDLRRLAKESDESLKKSHRELRKRHEEVRRTIEELLKDLERTVKEIKEELERDVKDEKKLKELEDRLRELIERLRELMKRLTDESRRNLEEDKRLLEEYREALKKLEEELKELRRAGLPEEDVRREIKRVLDTIRKLNEDWKRRNEESKRRLDKLLDDAKKAIDKIVEDVKKLLEDARR

SEQ ID NO: 12563 - protein, 186 aa, Artificial Sequence; identical to SEQ ID NO: 12562
  Synthetic

SEQ ID NO: 12564 - protein, 186 aa, Artificial Sequence
  Synthetic
SEVEKLLRDLERLARRVREELRKSHEKLDKLARDSKKSIEDLLEDLRRIIEEIEEELDRRVRDKDKLKRARDELRRLIDELRKIVEKYEEELKRLKKEDRDTLKDVDDKLRDLRRRLKKLREDGLPREDVEREVRRIKREIKELLDRWRRANEEIAREIRKLNEEVKRRVEKILRDLEELLRRLRK

SEQ ID NO: 12565 - protein, 186 aa, Artificial Sequence; identical to SEQ ID NO: 12564
  Synthetic

SEQ ID NO: 12566 - protein, 184 aa, Artificial Sequence
  Synthetic
SELEKLEKELKDLLDKIRRDLEKSLKENDELVKKIEEDLKDLLKKLDDRLEKVARDLKREKSGREKELEDLRRELEKIKEELKDELRRLKDENRKSKEDNERILKKLEDELREIERRLREAKIERETATKRVKEVLDKLRKMLEDLRRHNEENKRRNKEVLDELRKKAEDVLRRIDEALKELKR

SEQ ID NO: 12567 - protein, 184 aa, Artificial Sequence; identical to SEQ ID NO: 12566
  Synthetic

SEQ ID NO: 12568 - protein, 183 aa, Artificial Sequence
  Synthetic
SVEEMETRLKEVADDLKKKIDEVLTRLEKLNRELTKRSRDMNRELERLNKEAEDRARDVLKRVDKDTLKRELEELKKHVKEVKDRSREIEEKLRRHLDEVRKRVEELKRRLDDTLRRLRERQVDRDEARKLLRDLERLIEEIKKTLDELLKHHKEELDRIDREHEELLRHHKKTLERIEEKID

SEQ ID NO: 12569 - protein, 183 aa, Artificial Sequence; identical to SEQ ID NO: 12568
  Synthetic

SEQ ID NO: 12570 - protein, 176 aa, Artificial Sequence
  Synthetic
DRVEKVLREIEKRLRDHRKRLKDALDEIRKRIEEHEEKSERLNRESKKLLKDLEDMKRRGDLDEDTVRRLEEENKKLLDELDKHLKRLKEEIEKLLRDLNRHLEKLKEDIKRLEDEVNIDEEVVRRARELVKRLEEDHRRMVEEIRRTIKRAEERHKKSVEDNEKLLRDLRDRLEK

SEQ ID NO: 12571 - protein, 176 aa, Artificial Sequence; identical to SEQ ID NO: 12570
  Synthetic

SEQ ID NO: 12572 - protein, 176 aa, Artificial Sequence
  Synthetic
SEVEKVLEDLKRLLDEHEKRSRELNKRSKKLADEARRINEELLRELKKLLDELKELKDRGDLDERTVEELRKTAEDINRRNKEMLKKLSDENEKLLDELNKHLEELERRVRELERDANVDKKFLDDMRRLLEELKERHERSERENRKLLRKLEEDSKRTNDESKKLLDKLRDDLEK

SEQ ID NO: 12573 - protein, 176 aa, Artificial Sequence; identical to SEQ ID NO: 12572
  Synthetic

SEQ ID NO: 12574 - protein, 176 aa, Artificial Sequence
  Synthetic
DRVEEVLKRVEELVKRHDERLKELEDDLRRLIEEHLEKSRRLNKESEKLLKEILEVKRRGEADEKVAEDVERRNEKLLRELNEHLERLERTAKKILEEIDDHLRRLEEEIERLKRELNLSEEVVKTIDEIVKELRKRHEEVRKRLKELLDEMRERHERSVRRNRERLEKLLDDLRK

SEQ ID NO: 12575 - protein, 176 aa, Artificial Sequence; identical to SEQ ID NO: 12574
  Synthetic

SEQ ID NO: 12576 - protein, 176 aa, Artificial Sequence
  Synthetic
SEVERVLRDVERLLEEHRKKSKEANDTSRELARRHKEESDRLNKKSEDDARRLEDVKRRGEVDEEKLKELSKRNKKLLDDLNRHLEKLKEDNERLLRELDEHLRRLEETIKKLERDVNIDEDMVRRIREIVKKLKRDHEKSVEDNRRLLRELEERHRESVERNEDLLRRLEERARK

SEQ ID NO: 12577 - protein, 176 aa, Artificial Sequence; identical to SEQ ID NO: 12576
  Synthetic

SEQ ID NO: 12578 - protein, 176 aa, Artificial Sequence
  Synthetic
DEVETVLRDLKRLLDEHRRRSEELNKRSEELLREHEERSKRLNERSEKLARELREMKKRGEVDEETVKDLARENEELLRRLDKHLEDLERENKRLLRDLDRHLEELKKTVEDLKRRANVSEEFVKRMDELLRKLEEDHRRSVRENEKLLEELRRRHKKSVDDNRRLLEKLKRDADR

SEQ ID NO: 12579 - protein, 176 aa, Artificial Sequence; identical to SEQ ID NO: 12578
  Synthetic

SEQ ID NO: 12580 - protein, 176 aa, Artificial Sequence
  Synthetic
DEVEEVLRRIEELLTRHRKKSDDLNRRSEELAERHERTNRTLLEELRDLAKKLEDLKREGKLDERTVEELKKRAEKINRENKKHNDELRERNKRLLRELDKHMRELEERIRKLEKDVKVDEEVVKRMRDLVRRAKEEHKKSVDDNRRTLKELHDRSKKTNDDSRELLKRLEDRLRK

SEQ ID NO: 12581 - protein, 176 aa, Artificial Sequence; identical to SEQ ID NO: 12580
  Synthetic

SEQ ID NO: 12582 - protein, 176 aa, Artificial Sequence
  Synthetic
REAEEVLERIRRRLEEHLEDNERILREIKKRLDEHREKSKRVNDRSRELVERLLAVKREGKVDEEKVERLKKENEDLLRELDKHLEELKRRIRKLHEDNRRHNKELEDEIRRLEREANLSEDIVREIRRIVRELHERSKDSNREVERLVRKLEDDHRESVERNRELLKKLEDDLRR

SEQ ID NO: 12583 - protein, 176 aa, Artificial Sequence; identical to SEQ ID NO: 12582
  Synthetic

SEQ ID NO: 12584 - protein, 180 aa, Artificial Sequence
  Synthetic
RLEDVLREVREDLRRLNEESRKVLEENDKLDKDLNRRLKRLEEEARTEIKKVKDRLRDDEELKRLEKELEKILDRLRREVRKLNERNREELERLDKADKDINRELKRIEDEVKKLKERVDEDELEKRLTEVRKELEDRYRELIERSKDIIRRLEEEVRKLEKELRKVLEDLDRRAREATR

SEQ ID NO: 12585 - protein, 180 aa, Artificial Sequence; identical to SEQ ID NO: 12584
  Synthetic

SEQ ID NO: 12586 - protein, 177 aa, Artificial Sequence
  Synthetic
SEREDIKRLIEEIRKLVDEAAKEIERNIEEIRRLVKELEELSKKHIDEAREILERLKRRDDKKTIDEATERLRRSHKRLEERIREVKKRIDESHEKLREDLETLIREIRKLLRELRERTGDTELVEEMERDVREVERALRRLLDKHRRVLEDVERRLRRALEENRRVLEEIEEDSRR

SEQ ID NO: 12587 - protein, 177 aa, Artificial Sequence; identical to SEQ ID NO: 12586
  Synthetic

SEQ ID NO: 12588 - protein, 181 aa, Artificial Sequence
  Synthetic
KDEEATKKLRKAHEDSERHIKKLSEDTKKVHEESDRHIRKVSKETEDEARRIEKELRKLPDREELRDVMRRLKELLKTLREENERVRKRSEDLLRELEKRNKEVADESRKLLRDVEEALERGEVDEDTLEKIIEENKRLNDELAKENKEVIKENRKLNRELEERNKEVIDRMERILEETKR

SEQ ID NO: 12589 - protein, 181 aa, Artificial Sequence; identical to SEQ ID NO: 12588
  Synthetic

SEQ ID NO: 12590 - protein, 181 aa, Artificial Sequence
  Synthetic
REEELKREMEKAHEESERHLEELSRKTRDVHRRSEEHLKRLHERTKEVVDRIVEELRRLPKTDELRKVIEELERLLRTLKKENEDVRRESEELLKRLEEENKRVLKESRDLVRKVEEALRRGEVDEETLRRVIEKNRKLNEDIAKRNEEVIETNKKLNEEIARRNEEAIKTARKIVEDTKR

SEQ ID NO: 12591 - protein, 181 aa, Artificial Sequence; identical to SEQ ID NO: 12590
  Synthetic

SEQ ID NO: 12592 - protein, 181 aa, Artificial Sequence
  Synthetic
REKEVVDRLREEVRRVEEEVDRLNKELEEIARKVERELDKINEDYKRRLDKVREDIKRLPKTDELRTVEKRSDDHARELHKRSEEIKRDIRRRLKELHDRSREIKKTIRDLLRELEEMMRRGDVDEETVKRILETARELLDRWKKEVDEIVKTLEELLDRWRKEVERVKRENDKLLEELEK

SEQ ID NO: 12593 - protein, 181 aa, Artificial Sequence; identical to SEQ ID NO: 12592
  Synthetic

SEQ ID NO: 12594 - protein, 181 aa, Artificial Sequence
  Synthetic
DEKKVLDDLRRIVEKVKRDLDELLKDNRRVLREVEEELKRLNEELRRIAEEVTRELRRLPRTRELERIEKEIERRLKELHERSDELRRRLRKLHDELREKLERLKKRMEDLLRTLKDLVDKGDVDEKLAEEVARELRRLLREAEETSRDTKRKLREVLREWRELVKKIVDEMRRLLEEIKR

SEQ ID NO: 12595 - protein, 181 aa, Artificial Sequence; identical to SEQ ID NO: 12594
  Synthetic

SEQ ID NO: 12596 - protein, 179 aa, Artificial Sequence
  Synthetic
DLERLVEEIKRRLRELLKELHKKSKEIEEEIRRILKRHHELLERIVRRLEELVEEVKRRNSDDDTVKKRVKEEIDRLLEDYKRHLEEVERLLRKLLREYEEKVKEIEKEIRKLKKRLEEAGVDKKLLEDLEREIEKVKKAARDDLRRLEEIVRDVERRLRENVKRLKEEADRVKEELEK

SEQ ID NO: 12597 - protein, 179 aa, Artificial Sequence; identical to SEQ ID NO: 12596
  Synthetic

SEQ ID NO: 12598 - protein, 186 aa, Artificial Sequence
  Synthetic
EELERIKDEIRRILEELKREMEELTKESDRILRELERENEESAKRIKEILDELEKRVRDKPVDEKLKRELEELKERLKKLLKEVEDTTRKLKRELKELNRELRRRLEELEKRLRELLKKVDRDKSDDETLLRRLRESLEKLAKEVEDLLRKYERDVRELAKEDRKLNEELLKRVDDLAKEVRERLR

SEQ ID NO: 12599 - protein, 186 aa, Artificial Sequence; identical to SEQ ID NO: 12598
  Synthetic

SEQ ID NO: 12600 - protein, 182 aa, Artificial Sequence
  Synthetic
SKLEEIERELRELERSNEEEDRKWDDTTRKLEEDNREKNREWKKLTKDIRERVERLIRDLKDDKKTVRELRKEIRERSEKVRKELERHLEEVKDASRKLKKRLDDHRRELRDTVRRIRERLDKSEEARRLDEELEKVLRELKKRNEDTERRDREVNKKLEKENRDSEKENRDVLREIERALR

SEQ ID NO: 12601 - protein, 182 aa, Artificial Sequence; identical to SEQ ID NO: 12600
  Synthetic

SEQ ID NO: 12602 - protein, 179 aa, Artificial Sequence
  Synthetic
KKLEDLEEEIKKLLEELKERNERSAREDREILERLRDENRRTAEELDKSVREILKKTGDTEDLKKLKEEHKELKKRLKETTDRIRKTSKDLEKELRDATERIARELKRLVDDLRRKNLEDDRKLKEVRDTLEKLREENRKLNEEWRRKSEELRRRNEKVNKEVRDRNRETIERVDRKAK

SEQ ID NO: 12603 - protein, 179 aa, Artificial Sequence; identical to SEQ ID NO: 12602
  Synthetic

SEQ ID NO: 12604 - protein, 186 aa, Artificial Sequence
  Synthetic
EELERADRRLDRLLEESERDLDTIIRKLKKVVEELERTLEEAKRKAERTLEEIRRELKEAGLEERRLRELEEKLRRAEEELRKLEEDHRRRLKEVTDEVRRLIERHRRRLEEIKRRLEDLRRKGEPVEDLLREIKELLDDLRRHNEKLHRELEELIKTLRRHNEKLLEDIERLLRELRKEVEKLRR

SEQ ID NO: 12605 - protein, 186 aa, Artificial Sequence; identical to SEQ ID NO: 12604
  Synthetic

SEQ ID NO: 12606 - protein, 186 aa, Artificial Sequence
  Synthetic
DELRELRRELRKLLEDIRRRLEELTRENRDVLRKSREELERLLRRLKELLDRIRDSLRKRNGDEDKKRELEKVEREIEKLLRDLKRDLERLEKESEDSLRELEKELKRIEDEIKKLLEDAERLLERGEVDKDKMKKLLRDLERKLKRAEEESKRHIRENEKLTEEAARKVEELLKEIKRKLEELEK

SEQ ID NO: 12607 - protein, 186 aa, Artificial Sequence; identical to SEQ ID NO: 12606
  Synthetic

SEQ ID NO: 12608 - protein, 172 aa, Artificial Sequence
  Synthetic
SVEDTIRELEKRIRDLNREMERLNRESVEKIKRLNEKVRREIEDILREIKRLAENLKDVDERDLERLLKELRDELERLSRDSERELKRLEEEHRRARKKSEEDLRRLDKEVKDKPIDESLRRKLKKLADEHRETVDRMHEKNRKLADDHRDSVRKLEERIKRLTDRLREERK

SEQ ID NO: 12609 - protein, 172 aa, Artificial Sequence; identical to SEQ ID NO: 12608
  Synthetic

SEQ ID NO: 12610 - protein, 172 aa, Artificial Sequence
  Synthetic
SEVEETLKRLEEVIREAEKTIDDSNREIEEAVRRIKTTIEKSNRDLKDLVEKLKRLKEIDSEEVKRRLDEAAKRHKEILDDLRRKLEELEKRHRDTLKRLRERLDRIREEIERRGTTEDVRRRVKEIIDKLERKIEESERNLKRIIEDLEREMRESEERVKEIIRDLERTEK

SEQ ID NO: 12611 - protein, 172 aa, Artificial Sequence; identical to SEQ ID NO: 12610
  Synthetic

SEQ ID NO: 12612 - protein, 179 aa, Artificial Sequence
  Synthetic
SEIDEVLKRVEDSVREIERKLEEIERRLRRLNEEVKKRLDEIEEEIRRLVEELRRRNTKDERALRRIEEKIRDLKRKLDEILKKLKEDYERLKRELDKLLREHEERSERIKEELKKRGLPDDRLREIEKRIDDLNKKVRDEVERLKREADKSLETIKRLVEELKEKLDRLLEEVREEVR

SEQ ID NO: 12613 - protein, 179 aa, Artificial Sequence; identical to SEQ ID NO: 12612
  Synthetic

SEQ ID NO: 12614 - protein, 175 aa, Artificial Sequence
  Synthetic
STRERLKKVLRDVERANKELSDRNKRVLEKLRRDVERLSRENEKLVRELEEAIKDLRRKGRDLREEVERLSDEDRRANEELKRRLKKLEDDLDRIDRDLERKSRRLVEELEDLLRRLNVDEDLRREVEEVLKRIRDSNRDNRRKNEKVKKDIREILRRNEKRNREVNEKIRRDET

SEQ ID NO: 12615 - protein, 175 aa, Artificial Sequence; identical to SEQ ID NO: 12614
  Synthetic

SEQ ID NO: 12616 - protein, 185 aa, Artificial Sequence
  Synthetic
KETEEVKDVLRRVRKRIEDLSKKNKDDLRRVEERNKELNERVKRLLEELKRRVDDLKRKGRREDDLTREVEKLERELEEVLRRMREETRKLEDEIRRLNEELDRRLKKLEKEIRDTLKALRERVERREDLERVEEDVRRVIKEIRDLARENHEENRDVIRRIRESNKRTEDEAREVLDRIRKTAT

SEQ ID NO: 12617 - protein, 185 aa, Artificial Sequence; identical to SEQ ID NO: 12616
  Synthetic

SEQ ID NO: 12618 - protein, 177 aa, Artificial Sequence
  Synthetic
KEREEAEEMLKRLEEELRRLLEESEKIIERSERHLEKLLKDAEDEIRRVKEELDKIDIEEKVIEEVKRKIDEIKRRLEELAERARKVHKDLRDRHRKLFEEFKRVLDEIRRRLDSGGDREEIRRLIERLRELLEEIARRIEKTNRELEELNKRLADDIKRLIDELERVLREVEERSR

SEQ ID NO: 12619 - protein, 177 aa, Artificial Sequence; identical to SEQ ID NO: 12618
  Synthetic

SEQ ID NO: 12620 - protein, 175 aa, Artificial Sequence
  Synthetic
DEVETLLEEARKVLEELRKKIKELNEDSKRVLEELEKRIRDLDRRSTEVLRRLEESDLDRKEVKKMLDDLRREYEDMERRIKEVLDELEKKYRELEKEIDRAREELTKRLEDLKREGKSTEELEDALRKIRKAVEELKKDVRRTLEEIKKEVKRLIEEARRSLDKIRRDVEKRDE

SEQ ID NO: 12621 - protein, 175 aa, Artificial Sequence; identical to SEQ ID NO: 12620
  Synthetic

SEQ ID NO: 12622 - protein, 175 aa, Artificial Sequence
  Synthetic
EEVKRLVDDLREVTKENEKRARDLDRDSKRVSEENARKIETLNRDNERVNKELADSDRREEEVEDALRRLEEEYRRVHKENREETKRLREKYEELHERNKEVLERLKRKVDELRRKGKSTEKLDEDLERLERRNRKINEDAKTTLREIERENEELNKRLEETLRRSEKHLRDRRK

SEQ ID NO: 12623 - protein, 175 aa, Artificial Sequence; identical to SEQ ID NO: 12622
  Synthetic

SEQ ID NO: 12624 - protein, 179 aa, Artificial Sequence
  Synthetic
REVEKLIKELEDLNRDHARKVKELIAELEKLLRDHAEKVRKLIEEARKTLEDLREIVERKGPVEELLKEAEKKLKEIKEEIERSSKELKKEIDRIEEDIRRSTERLRREHKRVADDLRKKGLDKKDVREMIRRSEENLKRLNEEVKRAIRKVEEDLKELNKRARDVLEELRKRVEDTFR

SEQ ID NO: 12625 - protein, 179 aa, Artificial Sequence; identical to SEQ ID NO: 12624
  Synthetic

SEQ ID NO: 12626 - protein, 177 aa, Artificial Sequence
  Synthetic
SEEEELEKRLRDSEREIEKWLRDLERVIEEVAREDKKIHEELEKILEDVKRELDKLGIDDELRKELEKKLRKIKEELEKLNEDTRRELERVRRDLERLAEELKRRHDEIRKELERTGDSKVVEKLVEDLRRINEEAKRRLERLKEELRKVLKDYKDEIDKLVEELKRTLDEVRKKAK

SEQ ID NO: 12627 - protein, 177 aa, Artificial Sequence; identical to SEQ ID NO: 12626
  Synthetic

SEQ ID NO: 12628 - protein, 177 aa, Artificial Sequence
  Synthetic
DEEEDVRRTLEKVERDVERIDEDVERELRKVEEDDKRLHKELSEVVEKVERDIRRTGIEEELMDTARRRLEEARRELERLNKRTKELLDRIRKALEESHREVKELLERIEEELERTGDKKKLEELKERLKEALKRHEDKVRELKKELKKILDDYTEDVKRIKERLKRILEEIRRRKK

SEQ ID NO: 12629 - protein, 177 aa, Artificial Sequence; identical to SEQ ID NO: 12628
  Synthetic

SEQ ID NO: 12630 - protein, 177 aa, Artificial Sequence
  Synthetic
SSEEDVKRELERVRREDERIHRDLERVLEESERRVETWDRDAKRTLEKVEEDLRRDGLEKELVDKLKEALDRIREDIERSHRELRKLHEEIRDELRKLNEETDRRLRDIEDKLRKTGEEELLEELKRRLKEILDRYRREAERLKRENEEMNKRHRERLEELKKRLKELLERMKEARK

SEQ ID NO: 12631 - protein, 177 aa, Artificial Sequence; identical to SEQ ID NO: 12630
  Synthetic

SEQ ID NO: 12632 - protein, 177 aa, Artificial Sequence
  Synthetic
STEEDVRRVMKKVEDDVREINRDLERDLRRVEEAVERLDRDAKREIDRLREEIDREGIEERLKKEADEVLRRVEEEIKKSHEEVRRLLEEVERRLRESTKELEDRLRKVKEELDRTGDEKFAEDLKRKLKKVLDEHRRRIEELKRELEEVLERHARELKRLKDELKKLVDDIRRRRK

SEQ ID NO: 12633 - protein, 177 aa, Artificial Sequence; identical to SEQ ID NO: 12632
  Synthetic

SEQ ID NO: 12634 - protein, 177 aa, Artificial Sequence
  Synthetic
SDEEDVERELKRVKDEVDKINEDVRRELRKSEEDVERWDEDLERVVRRVEEEVRKTGIDEELKRKADERLEEAKKRVEDSHRRLREEHRRIEKDLRDSTREIEKLLRDIRKRLTDTGDKKVLEKLKKDLRDALKRHRDRVEKLKEENRKLNEDHKKTLEDIKEELKRLLDELKETRR

SEQ ID NO: 12635 - protein, 177 aa, Artificial Sequence; identical to SEQ ID NO: 12634
  Synthetic

SEQ ID NO: 12636 - protein, 177 aa, Artificial Sequence
  Synthetic
SDEEDVERELERVKRDVERLDEDAKRVLDEVRKAVEEINRDVERDLRRVEEEIKKTGIEERLMEEAKRRLERIKEELKKSTEELERLLEEVKRRIEESHRRMEEELRRIREELERTGSKEKLKELKERLKRLLDEHRRELKRLKDELKKALDDHKRKVDKLKKELKDILKKIRDDRR

SEQ ID NO: 12637 - protein, 177 aa, Artificial Sequence; identical to SEQ ID NO: 12636
  Synthetic

SEQ ID NO: 12638 - protein, 177 aa, Artificial Sequence
  Synthetic
DDEDDVRRVLRRVAEEVRKLDEDLKRVLKESKERVKRWNDDAKRRLDKVREDLKRKGLDESALRRAEDVLRRIKKRIDESTEDLDRLHKEIEKEVRDSHKKMREDLDKVREDLERTGDKKVLEELKKRLEDLLKRHEEEVRRLKEENKKLNDDHRRELERLKKELTDLLKRLDDERK

SEQ ID NO: 12639 - protein, 177 aa, Artificial Sequence; identical to SEQ ID NO: 12638
  Synthetic

SEQ ID NO: 12640 - protein, 177 aa, Artificial Sequence
  Synthetic
SLEEDVKRVIDRVREAVKKINDEVEKELRKSEKAVEDWNRRLEEIHDRARRELEKAGIDEELRKREKREHERSEEELRRSTEELKKKHDEIRKRLEDSTREAKKTLEEVERELRETGDKDKLEELKRRLKRLLDEHRKRVEELKEENKRLNKEHEKKVEDNVRRVRELLKRVEDRRR

SEQ ID NO: 12641 - protein, 177 aa, Artificial Sequence; identical to SEQ ID NO: 12640
  Synthetic

SEQ ID NO: 12642 - protein, 179 aa, Artificial Sequence
  Synthetic
SEVEEIVKKLEELLRRWEKTVRDIVEELKRLLEEIEKLSRETKERLKKILEDVKRLAEEGRLDDAEVDRLRKELEDLHRELEERLRELMREMEERLKEANERSKRIKEEIEKDLKELTDRRGRVDELEDIARRVKEELDRLNEELERIARKVKEDLKRLLEDNKRVLDEVKERLDRIRK

SEQ ID NO: 12643 - protein, 179 aa, Artificial Sequence; identical to SEQ ID NO: 12642
  Synthetic

SEQ ID NO: 12644 - protein, 179 aa, Artificial Sequence
  Synthetic
SEIEDIVRRLEELLERWKRRVDKAKERNKRLLEKWAKEVEDIKRELEKLLEDVRRLKEEGRSDKRDVDRLIERIEELLERLHRRSEEIKRDSRRHAKELHRISEEIKERIRRLLKKVTDDKGRVDELEKIVEDVERELDKINEDYNRVLKRVEEELDRLNEDLNRVAKRVKDALRKIEE

SEQ ID NO: 12645 - protein, 179 aa, Artificial Sequence; identical to SEQ ID NO: 12644
  Synthetic

SEQ ID NO: 12646 - protein, 179 aa, Artificial Sequence
  Synthetic
SEIEKVVEEAKKLLKRWEDEVRKHDKELKEVLDRWKKEVDDIKRRLEELLREVRRLKEEGRSDDRKLEELKREIDKLLEDLHRRSKRLVEDLKRTHDEVDDRSKKIKKEIRDRLKDIERRRGPVDELRKIVEDVERELDRLNDENRDSLRRVVEALEEINKDLNRDVKRVKDELDKTRK

SEQ ID NO: 12647 - protein, 179 aa, Artificial Sequence; identical to SEQ ID NO: 12646
  Synthetic

SEQ ID NO: 12648 - protein, 179 aa, Artificial Sequence
  Synthetic
SEVEEIKKELKKLDEENKRVIDRIVREIERLNEENERVARKVIKEIEELLRKLEKLRRDGRSDETVVRKIKKDLEELLKRLEEHIRESKDRLRDLLRRVREHLERSRRRMEELRDRVRRNGKEEEDLRRVLKESEDRNRKLLEDLERKVRDVKRRDDELLKRAREALKRVKDEIEKIRK

SEQ ID NO: 12649 - protein, 179 aa, Artificial Sequence; identical to SEQ ID NO: 12648
  Synthetic

SEQ ID NO: 12650 - protein, 179 aa, Artificial Sequence
  Synthetic
SEVEDIIRRIKELDDRNERKVRELVKTNEKLLRDLHEKSKRIVKEMRELLKEIEDLARRGKSDDRRLEEVRERLKRLLDDYERTVERLKETNERLNRELEKHLEDSKKRLEDLREEVRRRGKDEEELKRVIDESKKRNEKLMRDYEEISKKVHEDVERDAERLRRIAKEVEEELERVRK

SEQ ID NO: 12651 - protein, 179 aa, Artificial Sequence; identical to SEQ ID NO: 12650
  Synthetic

SEQ ID NO: 12652 - protein, 179 aa, Artificial Sequence
  Synthetic
SEVEKIKEDLKRLLDEVRKKAEELKRENRELLRRLHELSKKIIRELEKLLEELADLVRKGRSDDKVVKRIRDELEKLKREYERAVKELRDRNRELNEELKRVLERVKEDMDRLREEVRRRGKEDEDLERTIREVEKELRRLLEDYRRESKKVHEDIDEDRRRLEDAVREVEKEIEKVRR

SEQ ID NO: 12653 - protein, 179 aa, Artificial Sequence; identical to SEQ ID NO: 12652
  Synthetic

SEQ ID NO: 12654 - protein, 182 aa, Artificial Sequence
  Synthetic
SEVERIKEDIKKSNEDIRRTAEEIKERIKKSNKEVEDEVREIKERIKRILDKLKRVKEEGRLDDRLKKEAEKVLEDIKRKLEELEEKHRRDLKRIRDRLREVEKRHRDELRRLREELKRRGSDKSVVDDLERVMKESEERVKRIIDDLERTLRESEKNLKRIIDDLERVMREAREAIDRLKK

SEQ ID NO: 12655 - protein, 182 aa, Artificial Sequence; identical to SEQ ID NO: 12654
  Synthetic

SEQ ID NO: 12656 - protein, 178 aa, Artificial Sequence
  Synthetic
SEDDELRRRLEELKRRIEDLIRKLREVLKRSEDELRKILRELREVDKDLRRRIEELIKDIQDEEVIDRLKKLLKRHTDRSRELEKRLKEILDELRKRHEKVERDLRRILEELKKLSDDRELDEDEAKKRLEEILRRAEELLERLKRTNERVNRKVREDMKRAKEHAKRLLEEAEELAR

SEQ ID NO: 12657 - protein, 178 aa, Artificial Sequence; identical to SEQ ID NO: 12656
  Synthetic

SEQ ID NO: 12658 - protein, 180 aa, Artificial Sequence
  Synthetic
DEVEELIKEVEKVNEDAARESEKRNRELKKMLERVKRENKRLIRELKELLDDARRKNSKDSTLSETLKRVLKESKERVDRLVKRVDDLLRELERRDRELHKKLEERHRRIRDRLREEVREKREVLKKLEEVLRESKKRLKEWNDRNKKTLDDIRREIEKSKKEHEDALRRIEEELKKTET

SEQ ID NO: 12659 - protein, 180 aa, Artificial Sequence; identical to SEQ ID NO: 12658
  Synthetic

SEQ ID NO: 12660 - protein, 180 aa, Artificial Sequence
  Synthetic
SELEKLVKELRDLNEKVARDSKRLNDKLEEVLDRLRRRNEELIKRLEEVLEDVERKNSKDSTLEEELDRLLKKSREDLDRLVDEARKLLDEARKRDKKLHEDLKREHDRVAETVRRDISKDKELLDRLRKMLKESRDSLRKLNKENEETLRRIKKKLDESKRKHEEVLKDIKRRLEELSR

SEQ ID NO: 12661 - protein, 180 aa, Artificial Sequence; identical to SEQ ID NO: 12660
  Synthetic

SEQ ID NO: 12662 - protein, 180 aa, Artificial Sequence
  Synthetic
DEVERIIERLRRVNKRVREENERLIKEIEDLITEIAKRSRDLNRELDKTLKDVRRKNDKDERLKREVEELLKRLEEEDKKLHDDAERALKRSKEEMDKLMRELERLHKEVKDELDRDVREKEEVLRRLEKVLRESRKSLEDSAKKHKDVLDEVKKTLKKLNDENREVLKRIKKELDKTRT

SEQ ID NO: 12663 - protein, 180 aa, Artificial Sequence; identical to SEQ ID NO: 12662
  Synthetic

SEQ ID NO: 12664 - protein, 179 aa, Artificial Sequence
  Synthetic
SEVEKLIEDMKKVAKELADESEEHIKRAEEVIDRLAKEVEKHDRDVEDTIRRLEESDRDKREVEEVLKKIKRSSEELKEKLRRVLEKLRKTSKELEEKLREVLKRLEDRIRKLETEDRSSEEVKKRLREMLEELRRRLERLKDKNKEVLDRLEEKLRKLEKENDDSLKEAEDKLRERER

SEQ ID NO: 12665 - protein, 179 aa, Artificial Sequence; identical to SEQ ID NO: 12664
  Synthetic

SEQ ID NO: 12666 - protein, 179 aa, Artificial Sequence
  Synthetic
SEVEKLIEDIERIIRTLAEEVRRHDEDARRVLEDLARKVRKHNEDVKKVLEDLRESDRDRKFIKEVLERLRKTSEELKRELEEVLRRLRESSKELKRKLREVLKEIKRRAKKLEKDDTSSEEMKERLRRMLKRAEDELRRLEEENDRVVERLERELRRLTEDNKRTLKKIEEDLRRREK

SEQ ID NO: 12667 - protein, 179 aa, Artificial Sequence; identical to SEQ ID NO: 12666
  Synthetic

SEQ ID NO: 12668 - protein, 179 aa, Artificial Sequence
  Synthetic
DEVRDLIRRLEETVKRLADEVREHDKRARDILRELKKEVKETNRRSEKVADDLEKSDRDDKEVDEALDKLRKEYEDLKKRLDDVLEEIRKSSEELEKKLDKVLEEMARLVDKLRRDDTSSEEVKERLKKVLEKLKRDLEKLKEDNRRVLKELEEELRKIKEELDKSLDDLRKRLEDRKK

SEQ ID NO: 12669 - protein, 179 aa, Artificial Sequence; identical to SEQ ID NO: 12668
  Synthetic

SEQ ID NO: 12670 - protein, 180 aa, Artificial Sequence
  Synthetic
SLEEKFRRVLEESKESLERLKRKVEKVLRESEERLKRWLDKVKKVLEEVDDALRRLKDRLDEKLLKRLRDLAREILEEIKRLLDEAKKRHDEVRERVERLLKKVLDDHRRAEERVKREVRTKEIVERLIEELKKLNKELADRLEEIIRRLEEINERLRERIERIITRLRRLLEELEREAE

SEQ ID NO: 12671 - protein, 180 aa, Artificial Sequence; identical to SEQ ID NO: 12670
  Synthetic

SEQ ID NO: 12672 - protein, 184 aa, Artificial Sequence
  Synthetic
SEDEDLKRVLDEAEKRLKDLLDDLRRALKRSEDELRKNNEDLERVLKRVEERLKELLDRVDRDSLKELLDRVREALERLRREVEETTKRVSDEHRRLLEEAERTLEEIRRRLEDLERRVRKKSRRREIVEEIKKRIRDLLRELEKKIEELKTTSERLNREHHKKIEDIKKEIEDLVRELEKKVK

SEQ ID NO: 12673 - protein, 184 aa, Artificial Sequence; identical to SEQ ID NO: 12672
  Synthetic

SEQ ID NO: 12674 - protein, 184 aa, Artificial Sequence
  Synthetic
SLREKLEEVLRRIEEALERIREEVEKVLRDSRDDNRRVLKELKELLERVREALEDLLRKVDRDRVRETLKRVEDRLRELEEEVRRHHKRSEDRHRELEKDLERVLEEVKRRLRKLEKDVEEKSRTDKIVKEIIEELEKLLRDIKKRARELIEESKRINEDNNRRAEEVAEEIRRLLEELERKLR

SEQ ID NO: 12675 - protein, 184 aa, Artificial Sequence; identical to SEQ ID NO: 12674
  Synthetic

SEQ ID NO: 12676 - protein, 184 aa, Artificial Sequence
  Synthetic
SLEEDVKRVLREAEEELKKNNERLRKVIEDSKRDNDRVLDELRKVLEDIEKALRDLLREVDRDRLREDLERVRRRLEELSRRAKEHHKESRKEHEKLRDDARRVTEKVEERLRRIREDLERRSRTDKIVDEVRKEIEKLVRDHHKRIKDLKDDLKRLNDENNKRAKEIIDEMKRLLEEIEKRVR

SEQ ID NO: 12677 - protein, 184 aa, Artificial Sequence; identical to SEQ ID NO: 12676
  Synthetic

SEQ ID NO: 12678 - protein, 182 aa, Artificial Sequence
  Synthetic
KDVEDIKRRIEELNKKLKEKIERIKKRIKELNEEAAKKVEEIKERLKRLLDEIRELVRRDGPREDEIRRLREDLKRLLKEMEDTLKELEDRHERLREEVEKTLRELEKKHKELKEELDRQPVDDSLRKRLEEVLRESKKTAEDLKRDLRRALEESKKNLKRLLDEVRKVIDEIRKALEELER

SEQ ID NO: 12679 - protein, 182 aa, Artificial Sequence; identical to SEQ ID NO: 12678
  Synthetic

SEQ ID NO: 12680 - protein, 182 aa, Artificial Sequence
  Synthetic
SEVEKIKKDIKDLNDDARRRLEEIKRRLEKLLKELEEKHRELKKELKKLLDEVRDLVRREGPREEVLREVKKRLDDVRRENKKLTDEVREILKKLEEEMKRILEELERRHRELKKRLDEEPVDDRLREDAERVLRESKKNLDELEKDVRRVIKRIEDEARRLNEDLKRMLERIKRELEKLEK

SEQ ID NO: 12681 - protein, 182 aa, Artificial Sequence; identical to SEQ ID NO: 12680
  Synthetic

SEQ ID NO: 12682 - protein, 176 aa, Artificial Sequence
  Synthetic
SEEERLEEVLKRVETELRRLKRELEKVLRESEEALREIIKKIEDAVRDNAEKVKKLSRTVDEDLVRELEKLLRDLERKSREAIRRLEELYREVKERVERVTRELEERLKDLERRVKERPVDRRVEKELEDLLRTATKVLEDLKRDLKRLNEETEEVVKTLEDSHRRSNEEVERRVR

SEQ ID NO: 12683 - protein, 176 aa, Artificial Sequence; identical to SEQ ID NO: 12682
  Synthetic

SEQ ID NO: 12684 - protein, 176 aa, Artificial Sequence
  Synthetic
REREELEEVLERSKRELERLVEEIKRALDESRRRLEEIEKRIEEVIRRNKEEIKKLSRRVDEETVRELEKRLRDLERRSKKVLTDLKKKYEEVEREAREVIKELREKYKRLEEEARRRPVDEKLKEELKELNRESRKVVEDLREKLDRLNKDTERVVRELEKEHRKSNEEVRKTVK

SEQ ID NO: 12685 - protein, 176 aa, Artificial Sequence; identical to SEQ ID NO: 12684
  Synthetic

SEQ ID NO: 12686 - protein, 182 aa, Artificial Sequence
  Synthetic
DEEEELKEDIKRILEELRRLAKEHEELNRRINKELEDLVREHKKRLEDALKRLREIVRDRGNDEDVTRRMDEILDELRKHSEDLKRRMDKLLRENEEHSDRLRKRIKELTDRLRRRVEDLVRKRGRVEELEKVLKEAEDDVERIKKRLKRINDESRKHVERLKEELDRADKRIEDEVEKLKK

SEQ ID NO: 12687 - protein, 182 aa, Artificial Sequence; identical to SEQ ID NO: 12686
  Synthetic

SEQ ID NO: 12688 - protein, 182 aa, Artificial Sequence
  Synthetic
RIEERLKRVVDKVDDTLRKSEKHLEDVVRDADRDIDRNRRENEKVVKEAEDILRRLVEEAGRELDDLRRVKKEVDKLLKENEEKLKKVREDIERILRDLKRKHEAVRERLRKLLTDVAREKIPEDKVRELEEEAERLLDELRRKNEEAVRRIKKLLDDLNKHSEETIRRIKKLLKELEDKTR

SEQ ID NO: 12689 - protein, 182 aa, Artificial Sequence; identical to SEQ ID NO: 12688
  Synthetic

SEQ ID NO: 12690 - protein, 178 aa, Artificial Sequence
  Synthetic
STEEKLKELKKEADKLLKELDKELRDNLRRLRKIVEELKKENRDLTRESEEVLKRLNSDDETVERVLRELRERHRKLEEETEEVLRRLERKHDKLREDLKRIVDEIEKKIRDIRRKPVDDKDVKKLIEEIRRILEKAREEVERLSRDSKRVAEELRKRHKELIDRNKRVLEELKRRRD

SEQ ID NO: 12691 - protein, 178 aa, Artificial Sequence; identical to SEQ ID NO: 12690
  Synthetic

SEQ ID NO: 12692 - protein, 178 aa, Artificial Sequence
  Synthetic
SEVEEVARRSRKLNDDLKKIIEELIRRSRKINDELRREIERLIRESRKLNRELEELKRRGELTEEILKKAKEDHERLDRKVKELLKRALDTHRKLTDEARKKLEEVLKRHEDLARKLKDTIEEDKVRRLNEENKESLRRLERELEKLNKENEDSLRTLEELLRELNKENKRSLDELRK

SEQ ID NO: 12693 - protein, 178 aa, Artificial Sequence; identical to SEQ ID NO: 12692
  Synthetic

SEQ ID NO: 12694 - protein, 177 aa, Artificial Sequence
  Synthetic
SLVEEVEERVKKLHDENRELDRKSKRDVEEVHKKNEKLIKDVERTVREMIRKLRELKGTSEETVRRIEEEVRKVRTELEKEMRELSKENEDVARRLREEYKRAEEKNKRAVEEIRKRLLDVEEELRRLEEELRRSIKESREELRRLEDELRRSIEKLEDALRRLAKELDEVIKDLKD

SEQ ID NO: 12695 - protein, 177 aa, Artificial Sequence; identical to SEQ ID NO: 12694
  Synthetic

SEQ ID NO: 12696 - protein, 177 aa, Artificial Sequence
  Synthetic
SLVDEVRRRVDELHKDNKRLDDESEKKVRDAHRENERLDDESRRKVKEAIRKLEELKGTSEETVKEIIKEVEKVVDELRKEYDDLERRNKEVADRLREEYERARKKNEDVLREIRDKLLDVKESLDRLAEKLKKSIKESEDILRELEKRLRDSIRESRKILEDLRRELEEVIKRLED

SEQ ID NO: 12697 - protein, 177 aa, Artificial Sequence; identical to SEQ ID NO: 12696
  Synthetic

SEQ ID NO: 12698 - protein, 177 aa, Artificial Sequence
  Synthetic
SLAEEVEKRVRDLHRKNEELDRESEKKVRDMDRKNKELIKRAEEEVKKVIDKLRKLKGTSEETVRRISEEVKKIVEDLERELRKLEEENRRVVEELRDKYRKLEKENRDMLEDIKRRLLDVEEKLRELARRLKESIRESRERLRRLEKELEDSIRELRRAIDTLTKRLEKAIEELER

SEQ ID NO: 12699 - protein, 177 aa, Artificial Sequence; identical to SEQ ID NO: 12698
  Synthetic

SEQ ID NO: 12700 - protein, 177 aa, Artificial Sequence
  Synthetic
SLVEEVERRVRKLHEENKKLDKESEDKVREANRRNEELIKKVTESVRRMIEKLRRLKGTSEETVRRIKREVEEVVKKLRKEMKDLEEENKRVVEELRKRYKDAKKRNRDALEDIKRRLLDVEEELRRLADELRRSIEESERILKKLEEELRRSIEELRRALEELDEELKRVIRELER

SEQ ID NO: 12701 - protein, 177 aa, Artificial Sequence; identical to SEQ ID NO: 12700
  Synthetic

SEQ ID NO: 12702 - protein, 177 aa, Artificial Sequence
  Synthetic
SLVEEVKKRVDDLHKRNRELDDRSEKMVRKANEENKELDKKSKEDVDRLIERAERLKGTSEETVKEITRDVERVAKRLEDEYRELEKRNREVVRELRKRYDDLEKENRDMLKDIRDRLLDVEEELRRLAEKLKRSIEESREILKELERRLRESIRRSREILKRLKEELERAIERLRR

SEQ ID NO: 12703 - protein, 177 aa, Artificial Sequence; identical to SEQ ID NO: 12702
  Synthetic

SEQ ID NO: 12704 - protein, 177 aa, Artificial Sequence
  Synthetic
SLAEEVEKLVRDLHRKNKELDRRSKKTVEDIEREARELDKRSKEEVERMIKKLRELKGTSKETVDDIEREVREVVEKLRKEYEDLSKKIRDVADKLRDDYRKLEEENRKALEDIRRELLDVEDKLRELEKELRDSIRESREILERLERRLEELIRRSKRILEELERELEEVIRELRR

SEQ ID NO: 12705 - protein, 177 aa, Artificial Sequence; identical to SEQ ID NO: 12704
  Synthetic

SEQ ID NO: 12706 - protein, 177 aa, Artificial Sequence
  Synthetic
SLDDDVEKKVRELDKRNEDLDRKSEKEVEKVHRKNKRLDDESEKEVKRMIEELKKLKGTSEDTVRKIKEEVEEVVRKLRKEYKELEEENEEVVKKLRKEYREAEEENRRMLEEIEKRLLDVEEELRRLAEELRESIERSRERLKELERRLRESIARSREILEELERRLKRAIEDLER

SEQ ID NO: 12707 - protein, 177 aa, Artificial Sequence; identical to SEQ ID NO: 12706
  Synthetic

SEQ ID NO: 12708 - protein, 177 aa, Artificial Sequence
  Synthetic
SLAEDVEEKVKELNRRNKKLDDESKEMVKRAHDRNRELDERSKDRVRRVIEKLRRLKGTSEETVERIDREVKKIVRELKEEYERAKEENKRVVDDLRRRYERLEDENREMLDDIRRRLLDVKEKLEELAERLRKSIEESRDILRRLEKELRDSIKRSEEILKELTDRLRKVIKDLRD

SEQ ID NO: 12709 - protein, 177 aa, Artificial Sequence; identical to SEQ ID NO: 12708
  Synthetic

SEQ ID NO: 12710 - protein, 177 aa, Artificial Sequence
  Synthetic
SLVEEAERRVRELIKELERLDDRSREMVKEMHERNRELIERVEKRVREVIEELRRLKGTSEETVKRISEKVKEILDRLRKLVEDLRRENERVVEELRRRYKEAEDRVKRLLDEIRKRLVRSEDDLRKLAEDLKRVLKRSRDILRKLEEDLRRSIRELEEALRKLEEDLRRAIEELET

SEQ ID NO: 12711 - protein, 177 aa, Artificial Sequence; identical to SEQ ID NO: 12710
  Synthetic

SEQ ID NO: 12712 - protein, 177 aa, Artificial Sequence
  Synthetic
SLKDDVEKKVEDLKKEAKDLDRESDKKVKTAHKRNEELDRKSADDVRKLIRKLEKLKGTSEETVKRIEEEVKEVVRRLREEYKRMEDENREVVRRLEKEYRDLERKIRELLERIKDKLLDVEEELKRLAEELERLIRDSRRILEELKRELKRSIEESRKILEDLERELEKVIRELKR

SEQ ID NO: 12713 - protein, 177 aa, Artificial Sequence; identical to SEQ ID NO: 12712
  Synthetic

SEQ ID NO: 12714 - protein, 177 aa, Artificial Sequence
  Synthetic
SLAEEVERDVKRLDEENKRLDDRSRREVEKMDEENKKLIEDARREVREMIEKLKKLKGTSEETVERIKREVEKVLRELEERVRRLAEKNKEVVERLKKEYEEAAKKNKEVLDDIRRRLLDVDEKLKELAKRLRDSLERSKEELKKLEEELRKSIKELEDALKKLEEDLRDVIRKLEE

SEQ ID NO: 12715 - protein, 177 aa, Artificial Sequence; identical to SEQ ID NO: 12714
  Synthetic

SEQ ID NO: 12716 - protein, 177 aa, Artificial Sequence
  Synthetic
SLVEDVERKVRELDKRNRDLDRKSKRKVEEADKENRKLDEDSERKVRELERKATELKGTSEEAVKRIEDEVREVVRRLRELYKTAEEKNKEVVKTLEKLYRDMERRNKEVLDEIKKRLLDSEESLRRLEEELRKSIKESKEILDELRKELEKSIRESKERLKELEKRLEELIRELKR

SEQ ID NO: 12717 - protein, 177 aa, Artificial Sequence; identical to SEQ ID NO: 12716
  Synthetic

SEQ ID NO: 12718 - protein, 177 aa, Artificial Sequence
  Synthetic
KLVEDAEELVRRLDEENKRLDDDSKRRVEEANRENEKLIKEIEDEVRKMIKKLRDLKGTSEETVKRIEKEVRDVVRDLKRLVDELKRRNEKVVKDLRRKYEEAKRKNEEVLEDIKRRLVRSEEELRKLAKRLKDSIDRSRKILEELERELRRSIDELRRALEELTDELRKVIEELRK

SEQ ID NO: 12719 - protein, 177 aa, Artificial Sequence; identical to SEQ ID NO: 12718
  Synthetic

SEQ ID NO: 12720 - protein, 177 aa, Artificial Sequence
  Synthetic
SLAEEVEKEVKKLDEENRKLDRDSTETVKELNKKNERLDRESKRKVDEVIEKLERLKGTDREIVERIAEEVKEIVKELEEEYRRAKRENEEVVKKLRDEYRRLEERNKKALKDIRDKLLDVKEKLDELADELKKSLDRSRRILERLEEELRRSIRRSEDILRRLKEELERVIRELRR

SEQ ID NO: 12721 - protein, 177 aa, Artificial Sequence; identical to SEQ ID NO: 12720
  Synthetic

SEQ ID NO: 12722 - protein, 178 aa, Artificial Sequence
  Synthetic
SVDEEVEKLLKEHEERIRELIKEVEKLNREHAKRIEELIRKLKETNKRIADKIRDLKRQGRDAKEEVEKELRRLEEEHERVRREVKRSTEELEKRHEDLERRVRKSSEDLKDRLRRLRDGLDEEKLRTIARRIKELNDRFKRAIDESRKHIEELNRRLEKVVEDSRRHLEELADEVRR

SEQ ID NO: 12723 - protein, 178 aa, Artificial Sequence; identical to SEQ ID NO: 12722
  Synthetic

SEQ ID NO: 12724 - protein, 178 aa, Artificial Sequence
  Synthetic
SVLEELKRLLDEHRERLERLIRELRKLNEDHDRRIKELIERLKKLNEDIAKRIEDLKRDGRKVDEEVEEILKRAREEHRRLEEEVRESTERLKRKHDRVKEEVEDSSRELKERLDRLRDGADEDVLRKIEEDIKRLNREVEKAIRESEENIKRTNKRFKDELRKSEKHLEELVKRFRD

SEQ ID NO: 12725 - protein, 178 aa, Artificial Sequence; identical to SEQ ID NO: 12724
  Synthetic

SEQ ID NO: 12726 - protein, 178 aa, Artificial Sequence
  Synthetic
SVLEEVTKLLKDHEDRIREIIKRLRKLNRDIDERIKRLIDEVRKKNDDIRRKIEELKRRGRDRREEVRKDKKDLKKDHDDVRREIDDTLRRAREEHDRVREEIRESSRRIEERLKELKDGLDEERLKRLREELEKLNRDVERVIKESKENLDRTVTEAKRELKRSEDNLERLAREFER

SEQ ID NO: 12727 - protein, 178 aa, Artificial Sequence; identical to SEQ ID NO: 12726
  Synthetic

SEQ ID NO: 12728 - protein, 175 aa, Artificial Sequence
  Synthetic
TEEEILRRVERDLERLNRELERIVREVEKELKKINDDYERVLKKVKDDIDRIREELDRQGVRTEEADERVKELIKKSRDHARRLNEESKKIIDDIRKLLREVHEKSEEIIKEMRRAKLSDKELEELLKRWEEDVKRIVEEVKKLLDEWRERVKRAKDENEKLLRDLEKLVEDLAR

SEQ ID NO: 12729 - protein, 175 aa, Artificial Sequence; identical to SEQ ID NO: 12728
  Synthetic

SEQ ID NO: 12730 - protein, 175 aa, Artificial Sequence
  Synthetic
SKEDVLREVKRELKRLLDDNRRMLEEVEEAARRLNKDYNDVLKEVEEEIEKIIRELEKKGKKDERVDRRIEELKRDSRRHAEKLHDDSRKLREKLKEIHDKLKRDLDELRKRMDDADLSEEDLKRLLDEVRRLSEKTKEDLERILRKWKEDVERAKERNRRELERLEREIKELAR

SEQ ID NO: 12731 - protein, 175 aa, Artificial Sequence; identical to SEQ ID NO: 12730
  Synthetic

SEQ ID NO: 12732 - protein, 178 aa, Artificial Sequence
  Synthetic
ELDKIVEEVRKALREILEDYKRFSKEIHDRDKELADRLREILKDVKRAVDELIKKLSRTKELEETARRLEKRIEELRKEVEDHLKKSEDRNRELKEELRDTLRRVEETIEEIRRRGEPVEDVVRKLRELLERFRKKAEDLKEENKRINEENERKIREIVKTLRKLLDELREKLERTKK

SEQ ID NO: 12733 - protein, 178 aa, Artificial Sequence; identical to SEQ ID NO: 12732
  Synthetic

SEQ ID NO: 12734 - protein, 178 aa, Artificial Sequence
  Synthetic
SLEDTLRKVDKDLKDNMRRLEETAEKVRRDIDRDEERLRRISEELHRRIEELIKRLSRDERVKRKVEELKKRNEDNEREYKDTVRRIKEEIKRLEDEYKKHLEDVARRLEEIRRRGEPVEDVVRDAKRLLDEHHDLARKIVEDLRRLLEDLHRKSKKSVEDNERLLKRMEEILRETER

SEQ ID NO: 12735 - protein, 178 aa, Artificial Sequence; identical to SEQ ID NO: 12734
  Synthetic

SEQ ID NO: 12736 - protein, 171 aa, Artificial Sequence
  Synthetic
SELEEVARRVEKLLEKHKEDLKRLLEKSEEDLRRAEEEVKRLLEEIREELDRLRKRNVDRETVKEMEKKLEEKIKRLEDMLRRLEERDEELNRRSEEHNKELRKEIEDLLRKLPEDEEIKKVRKKVEDVHEESKRLNEENRRRTKEVSDKIREIIKEIRKEIKKASDELEK

SEQ ID NO: 12737 - protein, 171 aa, Artificial Sequence; identical to SEQ ID NO: 12736
  Synthetic

SEQ ID NO: 12738 - protein, 171 aa, Artificial Sequence
  Synthetic
DELERAVEEVEKRLREHLERIKRLLEESRELLKRHEKLLEDVLRRIRELLKRAEDRRIDEETVRRLRKEIEDLERELEKHNRELRKRDEDLNRESEEHNDKLRREIEELERRLRDDELIKRVKERVKEAHKRSRELNERNRRETEKMHKKSRDLLRKIREEVDRMSDKLRK

SEQ ID NO: 12739 - protein, 171 aa, Artificial Sequence; identical to SEQ ID NO: 12738
  Synthetic

SEQ ID NO: 12740 - protein, 170 aa, Artificial Sequence
  Synthetic
SEEELLRELEKKLRELRRKVDETLRDLRRRLKELEEDHRRTLEESERHLREVEKKLSRTRELERLAEELERRHRKASEEVKKRLTDLKRDLDRLKKDIDERLERLRDELRKRRVDEKLDRRVEELIKEIEELLREVEKLVEDLIRTIKKLNDDLREDNKRLAKEMEDRAR

SEQ ID NO: 12741 - protein, 170 aa, Artificial Sequence; identical to SEQ ID NO: 12740
  Synthetic

SEQ ID NO: 12742 - protein, 181 aa, Artificial Sequence
  Synthetic
SAVEDLEREVRKLIRDLEDLIRRLEERNKRIAEEIEKLNEELNRENKRIADEIRRIKDERGTDEEVAERIKRLLDDAARAHRELDREVERLLKEAEDEHKKLADEIRKLLARVDKALKDLRKDVSEEALERLKRELRKLAEELKKVLKRSRDHLKEVKRRHDENIKRSDDHLKRVADEARK

SEQ ID NO: 12743 - protein, 181 aa, Artificial Sequence; identical to SEQ ID NO: 12742
  Synthetic

SEQ ID NO: 12744 - protein, 181 aa, Artificial Sequence
  Synthetic
SVAEELEKDIRRIEEEIKELLERHRELNERIVREIEDLNRKLNEMNKRVVEELRKVKRDRGTDEEVEKRIRDILDKLRRLHRKVDREVEELLRALEEHAKELERRIRELLKRAREKLEELRKDVDDRVLKKLEKRLRELEEEAKKLLKESKEHVDEVRKRHEENIRRSEEHLRRVLEELRR

SEQ ID NO: 12745 - protein, 181 aa, Artificial Sequence; identical to SEQ ID NO: 12744
  Synthetic

SEQ ID NO: 12746 - protein, 181 aa, Artificial Sequence
  Synthetic
SVVEELERRIEEIAREIEELNERHNRKNKEIADRIRDLNRRLNEANKKIVREIEEIKRRDGDDEDVRREIRELLERLKELHRRVDRKVKELLDELEKHLREVDRRVEELLRRARKTLEDVRKDVDSRVLDKLRKELDDLRRRHEENVDRSRKHLEEVRKEHEENIKRSERHLEEVKKEAER

SEQ ID NO: 12747 - protein, 181 aa, Artificial Sequence; identical to SEQ ID NO: 12746
  Synthetic

SEQ ID NO: 12748 - protein, 181 aa, Artificial Sequence
  Synthetic
SVVETLEKRVRELIETLERLIERLDRENKRVAEEIKRLLDEHDKTNKEIVERIRDIKRREGTDERVRTEIEELLRRLEAHVRELKKTIEDLLRKLKEMHDRLREEIRRLLEEARKELEDLRKDIDSRVLRKLEEELRKLEEKLRKLLKDSEDHLREVLERAKRVLDDSRRHVDEVRREAEE

SEQ ID NO: 12749 - protein, 181 aa, Artificial Sequence; identical to SEQ ID NO: 12748
  Synthetic

SEQ ID NO: 12750 - protein, 181 aa, Artificial Sequence
  Synthetic
SVMEDLERRIREIIKEIEKLLEDLKRENRRVAEEIERLNREHNELNKRIAEEIERIKRRRGRDEDVSERIRELLEALKEHLRRLDEEVRRILKRLEDLHRELEKRIRELLKRAEDELEALRKDVDSRVLKKIEDELKKLEDKAREVLKRSRDHLKKVEDDHRENVRRSEEHVKDVLRRFEE

SEQ ID NO: 12751 - protein, 181 aa, Artificial Sequence; identical to SEQ ID NO: 12750
  Synthetic

SEQ ID NO: 12752 - protein, 181 aa, Artificial Sequence
  Synthetic
KVLEDLDRDIKRIIDEIRRLNEELNREIEEIKRRIKRLNEEHNERNKRLAEEARRIKDERGTDEEVLKRIKKLLRELEEHLEKLDEDVKKLLREAEESIRELDERVEKLLREIRKLLEDLRKDVEDEVLKRLEEKLERLREEHERNAREIRKELEKLEKEHRENVERSRRHVERVEREFET

SEQ ID NO: 12753 - protein, 181 aa, Artificial Sequence; identical to SEQ ID NO: 12752
  Synthetic

SEQ ID NO: 12754 - protein, 181 aa, Artificial Sequence
  Synthetic
SVVERLKEIAEEIIRRIEELNKEHNKRNREIAETIERLNREHNELNKTLVREMKEIKRDKGKDEEVTKTIEKLREELERHLDKLDKDVKKLLDDLRRHNRELDREVRRLLEELRKLAEELRKDIESEVLKKIEEDLRRLLRKHEENSKESEKHVEEVEERHRRNAEDSKRHVEKVKEEVDR

SEQ ID NO: 12755 - protein, 181 aa, Artificial Sequence; identical to SEQ ID NO: 12754
  Synthetic

SEQ ID NO: 12756 - protein, 185 aa, Artificial Sequence
  Synthetic
STEEVLKEIRDRLEELKREAKKVNDDTRERLKELEERNRRANEESKRRLEELERRVEERGTSEDMRRELERLRREADKTNEDDKRRTEELSKEVEDTNKRHEEELERLLTEVEKSLRRMEEENSEDERLLRELRRKLKEVEDTIRELNERLRKRIREIEEEVRESNERLRKKLREILEEIKETEK

SEQ ID NO: 12757 - protein, 185 aa, Artificial Sequence; identical to SEQ ID NO: 12756
  Synthetic

SEQ ID NO: 12758 - protein, 178 aa, Artificial Sequence
  Synthetic
SVVEEIDKIIKRIADRVRKIIEDLERLNKEIADLLRRIIEELKRLNDRIREEVDRLRRRGRDEEKKLADLIRTIAEVHKRAKEDIDRIAEKLRRAHTEVEKEVRKLEKELRDILRKVRDDVDEKVLEDVERKLERLKREVRRVLEESRKRLKEWKDRAREVLEESKRSLEEISRRLRE

SEQ ID NO: 12759 - protein, 178 aa, Artificial Sequence; identical to SEQ ID NO: 12758
  Synthetic

SEQ ID NO: 12760 - protein, 178 aa, Artificial Sequence
  Synthetic
SADETLRKVVEEVARKSEKLNKELEKVNKDLARAVEELIEELKDVITKIEERAKRLKDRGEPLEEEVRKLKEEVRKILKELEDRLRELEKRARDIHREVKKTDEDLRRRLEELLRRVKDRVDERVLEEIRERIERLNKRNKEVLDRSEESLRRLAEKLRRVIERVEEKLRKIEEDLKT

SEQ ID NO: 12761 - protein, 178 aa, Artificial Sequence; identical to SEQ ID NO: 12760
  Synthetic

SEQ ID NO: 12762 - protein, 175 aa, Artificial Sequence
  Synthetic
DKEDAIRTAEKRIRDSERENEKVDEDYRRELKRSEDKNEKADKEYKRRIEELVRRLLETRGREDEELRKLTEDSKRLSEENKKIVEDLKRDSEELLKRNEKLLRELKEEVREVKKEGRDEDTLRKLVDDIEERNRRIIEELKRHLDKLREDNERVIEELKRHLEEVAREVERRRK

SEQ ID NO: 12763 - protein, 175 aa, Artificial Sequence; identical to SEQ ID NO: 12762
  Synthetic

SEQ ID NO: 12764 - protein, 172 aa, Artificial Sequence
  Synthetic
SEKEEAEKLLREHHEKIKRLKEESKRINDENRKRIEELKRRSREINKELEEKVRRNDKDRKVIEKTLEEIERKHDELLKDAEDHHRRSEERHRELEDRVRKETRKVEDKLRKDGLREDTVKRIEDELKKNLDDLRRVLEKSKDDNRKLLEDLERELRESKKDARRLLEEVRK

SEQ ID NO: 12765 - protein, 172 aa, Artificial Sequence; identical to SEQ ID NO: 12764
  Synthetic

SEQ ID NO: 12766 - protein, 172 aa, Artificial Sequence
  Synthetic
SKEEELEKLLREHHEKIKRLKEESKRINDRIRRTVEELIKESEKINRDINDTVRKNDRDEKVIRRLLEDVRRKHEELRERLKRELDKVRERHKELLDRARRATERVKERLDRAGLREDSVERIKRELERNLDDLRRVLKESEDDLREILRRLKEVLEESERDLERVEREVRK

SEQ ID NO: 12767 - protein, 172 aa, Artificial Sequence; identical to SEQ ID NO: 12766
  Synthetic

SEQ ID NO: 12768 - protein, 176 aa, Artificial Sequence
  Synthetic
SELEELLERLERLIEENRRELEELIRELKEESDRTREELKRLIDRLKEKIDRVLKLKEDGRSREEEVRKIEEDIKKEIREMEERHEETKKRIEEKKKEADERHEELRERIKKEERDIPVDKDVLKEARERLRKLHEETKEAKKDLDRILDENEKEVKEVKKRLEDLLKELRDRLRK

SEQ ID NO: 12769 - protein, 176 aa, Artificial Sequence; identical to SEQ ID NO: 12768
  Synthetic

SEQ ID NO: 12770 - protein, 171 aa, Artificial Sequence
  Synthetic
SELEEVLKRIREEAERLMRRNEETLRRVKKTIEDLLRRNEKRLEDVKREADEIEKRKLDEDEVRKEDKRIEEEIKKLSDDSRDMERRIEEEIRRLEEDHKKKRRDTRERLKKAKLSERVKEEIERIEKRVREVHEEVNKRIEDLRREYRKEHKRVEDEIRRILREVREKRR

SEQ ID NO: 12771 - protein, 171 aa, Artificial Sequence; identical to SEQ ID NO: 12770
  Synthetic

SEQ ID NO: 12772 - protein, 179 aa, Artificial Sequence
  Synthetic
SEKEEVKKESEKLSRDTKKRSDEVHKEIKRLTDETERELREVEKEIERLAEELRRQNSVDERLAEELEREREKLREDLRRLKERYDRKLEELKERNKKEKKEYEDRVERTRDERDRNDTSEKVLEDELRENKKENKDLKERHDRTLEEVERTNRKVKEELRRVLRRVEESVREVAERAT

SEQ ID NO: 12773 - protein, 179 aa, Artificial Sequence; identical to SEQ ID NO: 12772
  Synthetic

SEQ ID NO: 12774 - protein, 186 aa, Artificial Sequence
  Synthetic
SKEETIEKRVEELKRENDEKVERIKREIEDLIRRNKELLERIKKEVRELLKELKDRAEKKGTSEDERRKLEDMERRIREKERKSEEDHRREEERLREETKRSEDRTRDLKRKIEEDERRLKKKDGKDRELDKALEDIERRIREHNKELDDELRKVREDSRRHLEKLKRELEEIREEARRITEELKK

SEQ ID NO: 12775 - protein, 186 aa, Artificial Sequence; identical to SEQ ID NO: 12774
  Synthetic

SEQ ID NO: 12776 - protein, 182 aa, Artificial Sequence
  Synthetic
EEKELLDKLKEDADRIKKELEDTLRELKKKHDDVNDRNRKHHEEVRRRAEKIKDKLRRDKVDEDEKRRIEEELRRLDEKSKKDEDRLKDEHEEITRELEKKKRDTRERIKKIRKDTEDKLRTKGTTGEEVRKRLDDLEREIKKIIDEIDERHRRLTEENKRSLDRDREELEKLKEEIKRTAD

SEQ ID NO: 12777 - protein, 182 aa, Artificial Sequence; identical to SEQ ID NO: 12776
  Synthetic

SEQ ID NO: 12778 - protein, 175 aa, Artificial Sequence
  Synthetic
DEAEKIKEDAKRLIEENDEIVRRIEEEMKKSHKENREILKKIKEDVDRSHEDLRRRSGDTDELREDKKKNEEDARRTEEDTRRAEKENKEETDKMRRDTEEDRKELKRKLDEVRKKGFREEVLKDLRRRSEEHKKKLEDDLRRHEKKSRDHKEKLKELLERHKRRVEEVRKRETK

SEQ ID NO: 12779 - protein, 175 aa, Artificial Sequence; identical to SEQ ID NO: 12778
  Synthetic

SEQ ID NO: 12780 - protein, 182 aa, Artificial Sequence
  Synthetic
SREELMEELERLLERLIREIEKASRENEERVKELKREIEESTKRNKETAKKLLDELTRSNSDEKVKRDLDRRLKELKDRNRKEEEDTKRRLEKLEKDNRDRERETDEREKEITRKVEEDVRREKKPKDELRKTLEDIRRRVEEAKERHRRILKTIKERSEKLTREHRKVNEDIEEKLRRAKK

SEQ ID NO: 12781 - protein, 182 aa, Artificial Sequence; identical to SEQ ID NO: 12780
  Synthetic

SEQ ID NO: 12782 - protein, 176 aa, Artificial Sequence
  Synthetic
SERETVERVLDRLREELEKIKKELEDVNRESKKEVERLLRRNEELHKKVEKDARDILRKKGETREDVRRELEKERRRSEDESRRLKEEDEREKKKSEERMRELDKDVKRKEDELRKKDLVGEELKKTLDKILEDAKEEVREDRKRNEKLNRELEERSRRNEEDLRRLLKKLKDEAD

SEQ ID NO: 12783 - protein, 176 aa, Artificial Sequence; identical to SEQ ID NO: 12782
  Synthetic

SEQ ID NO: 12784 - protein, 173 aa, Artificial Sequence
  Synthetic
DEKETIEERRKEIEKIIKDLEKNVRDHEKRIEEIIKEIRDNTEKLKKEAEDLLRRIRKEGNRDELRRRKEKRDRDSRRRMEEIKKRTDELAREHEETKRKIKEEEDERKERTKGKPTSRELEETLRRLDERTKKVIKEAEDVHRRLRERLRKIEKEHEDTLRELKKRLDDEAR

SEQ ID NO: 12785 - protein, 173 aa, Artificial Sequence; identical to SEQ ID NO: 12784
  Synthetic

SEQ ID NO: 12786 - protein, 186 aa, Artificial Sequence
  Synthetic
SAEDRLREADERYERELRRLKRELEEVIKEYRKAIEELKKELEDVLRRFREELKRLEEEKGTTSKEMDELKKRVEEEERKKKEEIDRNREENERRLKKVEDDTTRKEEDNRRRRKKVRDDITRRKGSGEEVREIIERLKESLKRNEEDVRRLIRRLKEELKRNKEEVERLKKELEDILRELADRAR

SEQ ID NO: 12787 - protein, 186 aa, Artificial Sequence; identical to SEQ ID NO: 12786
  Synthetic

SEQ ID NO: 12788 - protein, 186 aa, Artificial Sequence
  Synthetic
DAERELKKVEDEYEKRIRDLERDLRRVLEEYERAIEELKKELDDVLREAEKALEDLLRKKGENSEEVKEEEDRVRRKLERVREETKKNKRENDERLKRTREEMDENRKRNEKKRREVRDKIEKDKGSGEEVKEIKKELEESLKRNEDKVRELKRRLEELLKENEKKVRELIRRLEEELRRLAERTR

SEQ ID NO: 12789 - protein, 186 aa, Artificial Sequence; identical to SEQ ID NO: 12788
  Synthetic

SEQ ID NO: 12790 - protein, 186 aa, Artificial Sequence
  Synthetic
SAEEELKKVDDDYEREIRRLEKELEDVLRDVDRDHRRLEEELKKVIRDIEEALKDLLRKKGEETEELKKMAEDVRRRLEEVRRRIEKDKEDNKRKKEEIEKEIRDNREKNKRDRDRTRDKIRKDKGRGEEVREIKERLRKSLEDNERKVKEIIDRIREDLKENRDRVRKLIKDLDDELKELAKKAK

SEQ ID NO: 12791 - protein, 186 aa, Artificial Sequence; identical to SEQ ID NO: 12790
  Synthetic

SEQ ID NO: 12792 - protein, 179 aa, Artificial Sequence
  Synthetic
DEEREIEERIKRILEDLKRNLEDNERKIRKIVKDNRENNKRNEDKIRRILEELKRAKEEGNLTDDKLRRTEEETKRNSERNEEESRRTEDRERRNTERNEKKERDTREETKKDRERLRERGVETERVRKLEKDLEKALEEIRRRYEELLKRLKRENEESKKTYDKLIEELRRAAREIKR

SEQ ID NO: 12793 - protein, 179 aa, Artificial Sequence; identical to SEQ ID NO: 12792
  Synthetic

SEQ ID NO: 12794 - protein, 179 aa, Artificial Sequence
  Synthetic
DEKERIEEEIRRILRELEELTERNEKKIRDIVREIRKNSEENRRKIEKILEELEELKKEGSNTEETAKRKREEVDRNRRRNEEKARRIEEELRRNKEENDKRLEDTERELEKRRRDVRRRGVEDEEVEELLRRLRKRLEDLERRNKELLEELKERLERAEKRNRDLLKELEDALERIRK

SEQ ID NO: 12795 - protein, 179 aa, Artificial Sequence; identical to SEQ ID NO: 12794
  Synthetic

SEQ ID NO: 12796 - protein, 179 aa, Artificial Sequence
  Synthetic
DEEEEIEKKLRKNIRDAEEKTKRNKERAEDNLRKARENSKRNEEDIRRKLKRLKELKEEGNQRDEDDRRTREDSKRNEDDNDRKRRESEKDHKRNREKNKEDKERSRKRHEEETEDLKKKGLRTERVDRLKKELERMHRKLDKENRDIEKRVREEHRRLTERNRKLLEDLEEALERIRT

SEQ ID NO: 12797 - protein, 179 aa, Artificial Sequence; identical to SEQ ID NO: 12796
  Synthetic

SEQ ID NO: 12798 - protein, 179 aa, Artificial Sequence
  Synthetic
SEEEEIERRLRDNIRKAEENTRRNKEKIDRILEEMRENSKENKRRIEEILDELRKLKEEGNLTEEEAKRVREELERNKRRNDEKLERKRKDIDDNERRNREKEEKSRRDHEEETKELEKRGVRTERVDELKEKVERDHERLRKENEDLLRELRKRLDELRRENEKLLRELEEALDRIRK

SEQ ID NO: 12799 - protein, 179 aa, Artificial Sequence; identical to SEQ ID NO: 12798
  Synthetic

SEQ ID NO: 12800 - protein, 184 aa, Artificial Sequence
  Synthetic
SELERVREEIRRLERENEETLREVEEKIRKLLEENREALERVEERVRRVKEELKEVRRRQLDREELKKVEDELRRREEKIRREEDERRRRSEEDRKEEEKRTRRRSEDSERKREKTRRDISRVKDDDVRRDIERLDEEYERRHKDVNRKLKRLDDEYEKATRDVRRRLEELTKELRDEAEKVRK

SEQ ID NO: 12801 - protein, 184 aa, Artificial Sequence; identical to SEQ ID NO: 12800
  Synthetic

SEQ ID NO: 12802 - protein, 175 aa, Artificial Sequence
  Synthetic
SERERVDRLEERYEEESRRVEEELRRLLKRYEDFHRELRKRLEDIVREVRKTLKELEDRIDEEVVRTTEKRLEDLRRDLERRSRETEKRLKEIEDRLREEKEKSERDRERTKKLEDEIDTREIEKRVERLLEENEERLRRVRKEIKKALDENREILKEVEDRARKILEELRRKAK

SEQ ID NO: 12803 - protein, 175 aa, Artificial Sequence; identical to SEQ ID NO: 12802
  Synthetic

SEQ ID NO: 12804 - protein, 185 aa, Artificial Sequence
  Synthetic
SELEEVKRRVEEIKKKLKEDLDDHKRRNEKHIKELEDRLEEHRREIEELVRKLEELKRRNVDEETMKRVKEELEEMARRSKEREKDLRRRSEEAHRKSERDLEEAEKKLEEERKRIRDRARRRNSDEEVRKALKELEDDLRRVLEEIKRAHKKSKEDNKRVLDDLTEKHKRSEEELRDVLRDLER

SEQ ID NO: 12805 - protein, 185 aa, Artificial Sequence; identical to SEQ ID NO: 12804
  Synthetic

SEQ ID NO: 12806 - protein, 185 aa, Artificial Sequence
  Synthetic
SSLEELEKRNRERIEELERTLRELEERSRELNERLKRELDEHKKRIDELLEELRRLKEENVDEETLKRIEEKLRRDLRRSKERLREIKERLEREHKKIDDRKRERDKKSEKDKKDEREEVRRENSDEEVRRALEELEKSHDEVRERIKRRLDESKERNKRALEKIKRDHEESEERLRRALDRTRK

SEQ ID NO: 12807 - protein, 185 aa, Artificial Sequence; identical to SEQ ID NO: 12806
  Synthetic

SEQ ID NO: 12808 - protein, 185 aa, Artificial Sequence
  Synthetic
SSLEEVKKENEKLIKELKEELDKIRKENEEHIEKLERELERVKREAEKIKKKLEELKRENVDEKTLRELEKELRDRARKTKKETDELRRESEERHKRTDERERRLEEKSRRDERRTEDRVRREKSSKEVKDALEELKRSHRKVAKEIKEAVKESRKKNEEVAKKIKKALDELKRELDEALKEAKR

SEQ ID NO: 12809 - protein, 185 aa, Artificial Sequence; identical to SEQ ID NO: 12808
  Synthetic

SEQ ID NO: 12810 - protein, 183 aa, Artificial Sequence
  Synthetic
DEVETLEERVRRLKKELRDELKRNEDKVRKLKRELEESLKENAKKVEEVERDLERVKREGSDREEKRDERRRRTDKNREDNREDERRKEEDTEKNERDNERRTREVKRTADEDEKDLKRSNRETDEVRREIERLKRELERVIREYREAIERLKRDLKRAIDKYREDIKRLEEKLRRVDKELEK

SEQ ID NO: 12811 - protein, 183 aa, Artificial Sequence; identical to SEQ ID NO: 12810
  Synthetic

SEQ ID NO: 12812 - protein, 179 aa, Artificial Sequence
  Synthetic
SEVERVREENKRSEEKLKKLLEDSRRNLEENRKRLEELLRKSEENLERLKRELDELRKQNIKDSRDEKRTKDRLDRHREEVKRAEDRSREEHKRHKERVEREERKEERRNEEEEEDLRRKGVETEDLRRNRETNEELRDRVRRTHEKLEREAEKVHEDVRRRHKELEDEVREVLKELRR

SEQ ID NO: 12813 - protein, 179 aa, Artificial Sequence; identical to SEQ ID NO: 12812
  Synthetic

SEQ ID NO: 12814 - protein, 179 aa, Artificial Sequence
  Synthetic
SDEELIKRIREELERLLKELRDTIKEVEDRNRESLEDLDRVHKRIKEEIERLEKDLDVEEELLKRMREELTELHKENKERKERDEEKNRRVRERLEEEERKEEKEIRDVEREDKDSDRPSEELAKKLKDELRRAKDKVEEIKKRIRDTLEDNRKKAEELKRKNEEDLRRFEKKAEDVRK

SEQ ID NO: 12815 - protein, 179 aa, Artificial Sequence; identical to SEQ ID NO: 12814
  Synthetic

SEQ ID NO: 12816 - protein, 172 aa, Artificial Sequence
  Synthetic
SKEDKAREDVKRTIEELKDRNRKLNDKIRKTIEDLERRNEELNKENKDLVDELRDGDRRDEEIRKRSTEYRKRTEETDEEVERTERELRKELRDEDRKLKRRKDEIERKIREDNLPEEVLRELREEIEKLEKEHRDNVRKLERDLDRLRKKHEDNKERLERHTRRVEEEKRR

SEQ ID NO: 12817 - protein, 172 aa, Artificial Sequence; identical to SEQ ID NO: 12816
  Synthetic

SEQ ID NO: 12818 - protein, 179 aa, Artificial Sequence
  Synthetic
STEEDVRKIVDDARRNLEENKRRIEKIVKELEDKLRENEKKIRKILEDIRRLLEKFKRDDDKREEVEERIRTTKERTEDDTRRNTEENKKTSERKKKEIDDNSRRNEEKRKRIEDKERRDNLPEDIMRDLRRRLERIAREYKRLLDELKKRLDDIKKTYEDLLRRLREEIERAEEKARR

SEQ ID NO: 12819 - protein, 179 aa, Artificial Sequence; identical to SEQ ID NO: 12818
  Synthetic

SEQ ID NO: 12820 - protein, 179 aa, Artificial Sequence
  Synthetic
DEEEEVRKILEEIKKELDDNERRIRKNIRDAEETLRENEKRIRDILKEIEDLLKELKDRDDKREELEERIRREAKKKREELKRNEEDNERRREKSEREHRENSKRNKKRRDDTEERERRANLSEDILEKLRRDIERADEEYKRLEEELRRKHDEIRKTYEKLLKELEEAIERVEREAEK

SEQ ID NO: 12821 - protein, 179 aa, Artificial Sequence; identical to SEQ ID NO: 12820
  Synthetic

SEQ ID NO: 12822 - protein, 175 aa, Artificial Sequence
  Synthetic
SSKDLLEELRRTVEEVRKRSDDLSRESEEATRRVRKEHDRINKEVEDELRRVREDGERPKEAEEEAKEIRKKTEKETRDIREEIKRLRDEYEKTKKRLEDEKKKLEEDTEEIERRGSVSEDIVREMRKRLEELLRENEKRNEELLRRLKELLDRSRERVREIEERLRELLEEVRR

SEQ ID NO: 12823 - protein, 175 aa, Artificial Sequence; identical to SEQ ID NO: 12822
  Synthetic

SEQ ID NO: 12824 - protein, 182 aa, Artificial Sequence
  Synthetic
DAEKLKRDYEEKSRRVKETLDDLVRRYREEHRRVNEELRKLLEDLKKTVEDVEKEEGSSGEKARELEKTKKTLEEELKRIEEEVKEISERSKEKEERIKKEVKEIRDKSERDKKEIDDKRIDSERLEREIRKLEEENKRTLERVKEKIERLLEENEKVLKEVRDKVKTIKDRLRKLVEEIRR

SEQ ID NO: 12825 - protein, 182 aa, Artificial Sequence; identical to SEQ ID NO: 12824
  Synthetic

SEQ ID NO: 12826 - protein, 175 aa, Artificial Sequence
  Synthetic
SVEDEVRKIKRRLEEALERSEKKVRDMVRRNKEFLERAKRRVEEVVKENERALEEVKRRGNGEKELEDLHRKNREDKERERKDARKLHEDNRDEHRKHEEELRKLRRDLERKEKDADIDEEILRRVRKTVKDVEDTLKELNDRLEKIHREVKKELDRLLKELDDRHRKVAEDLKK

SEQ ID NO: 12827 - protein, 175 aa, Artificial Sequence; identical to SEQ ID NO: 12826
  Synthetic

SEQ ID NO: 12828 - protein, 180 aa, Artificial Sequence
  Synthetic
SVEELLRKLEEVLRKIREENERSLKELRDRAREIVKRNRETNRELEEVIKELEKRLSGADKEKVEELVRRIRRIVERVVEEDRRTVEEIEKIAREVVKRDRDSADRVRRTVEDVLRKATGSEDIVRKIERIVETIEREVRESVKKVEEIARDIRRKVDESVKNVEKLLRDVDKKARDRKK

SEQ ID NO: 12829 - protein, 180 aa, Artificial Sequence; identical to SEQ ID NO: 12828
  Synthetic

SEQ ID NO: 12830 - protein, 172 aa, Artificial Sequence
  Synthetic
DEVEKVLEEIKRALDDLRKKVEESKREIKEALKAVEKHTRDSDTANKRTLAEIERGVKSKDTERVRKLVEELSEENERSLREVRRVAEELLEINERVLEEVERVVEALLDLVRRGGSERVVEEVRRVLEELRRRLEKVTEDSRRAIERLAREDARVSKKSIDVNKKLDDDVR

SEQ ID NO: 12831 - protein, 172 aa, Artificial Sequence; identical to SEQ ID NO: 12830
  Synthetic

SEQ ID NO: 12832 - protein, 178 aa, Artificial Sequence
  Synthetic
DAEELVRELEERIKRSHERLEELLREVKRLIERSHEELKRLNEEVLRELDRVLDEVAKRGSDSEELLRELEERVARIKERSKESYARSKESLDRAKEVLEELYRASKRSLEEFERELREKGVDKDSARELERIVKENAELAERVFREVEKIVRENTKLAEDSVRELKRLVEELKKRAK

SEQ ID NO: 12833 - protein, 178 aa, Artificial Sequence; identical to SEQ ID NO: 12832
  Synthetic

SEQ ID NO: 12834 - protein, 177 aa, Artificial Sequence
  Synthetic
SAADEVVERMKELVATVKRENDEVVKELKKLVKELEDDNRRVVEESKKSVEDLARRVGKDKREVVEEVRRTSKELVERNEETAKRVDDLVRRLVEENRRSVTEVEELVKELVKELRRGSGSEDLVREVEKRVRDIVEESRKLAEETRKAVEDIIEKSKRIAEDTLEKNKEMVERLER

SEQ ID NO: 12835 - protein, 177 aa, Artificial Sequence; identical to SEQ ID NO: 12834
  Synthetic

SEQ ID NO: 12836 - protein, 174 aa, Artificial Sequence
  Synthetic
SESDEVIRDLARLLDELARHVDDSVRRMDEVVKRSTREADELAKRLDELVKEVEKKPGDERVERMVAEIERLVAEVLEELKKKYEKLKREVEENLRRLEETVRDIVEKARKVTEKGVSKEKIDRIIRELERILEEAKKKHEDVLRRLEDSLRRVAELLKAALDRLREIVDRLRR

SEQ ID NO: 12837 - protein, 174 aa, Artificial Sequence; identical to SEQ ID NO: 12836
  Synthetic

SEQ ID NO: 12838 - protein, 174 aa, Artificial Sequence; identical to SEQ ID NO: 12836
  Synthetic

SEQ ID NO: 12839 - protein, 174 aa, Artificial Sequence; identical to SEQ ID NO: 12836
  Synthetic

SEQ ID NO: 12840 - protein, 174 aa, Artificial Sequence
  Synthetic
SESDDVIRKLRELLEELRTHVEKSIRDLRKILEDSTRHAKRSIEELERLLEEVRKKPGDEEVRKTVEEISRRVAENVKRLEDLYRRMEEEVKKNLDRLRKRVEDIIREVEEARKKGVDEEKLKDLIRKLRDILRRAAEAHKKLIDDARESLERAKREHEKLIDRLKKILEELER

SEQ ID NO: 12841 - protein, 174 aa, Artificial Sequence; identical to SEQ ID NO: 12840
  Synthetic

SEQ ID NO: 12842 - protein, 174 aa, Artificial Sequence; identical to SEQ ID NO: 12840
  Synthetic

SEQ ID NO: 12843 - protein, 174 aa, Artificial Sequence; identical to SEQ ID NO: 12840
  Synthetic

SEQ ID NO: 12844 - protein, 178 aa, Artificial Sequence
  Synthetic
DREREVKKRLDEVRERIERLLRRVEEESRRVAEEIRRLIEEVRRRNKKVTEEIRELLKGLKDKEEVRRVLERLRKLNAESDELLERILERLRRLVEATNRLVKAIIEELRRLVEKIVREVPDSEELREELKKLERKIEKVAKEIHDHDKEVTERLEDLLRRITEHARKSDREIEETAR

SEQ ID NO: 12845 - protein, 178 aa, Artificial Sequence; identical to SEQ ID NO: 12844
  Synthetic

SEQ ID NO: 12846 - protein, 178 aa, Artificial Sequence; identical to SEQ ID NO: 12844
  Synthetic

SEQ ID NO: 12847 - protein, 178 aa, Artificial Sequence; identical to SEQ ID NO: 12844
  Synthetic

SEQ ID NO: 12848 - protein, 181 aa, Artificial Sequence
  Synthetic
SEVDEAVKNNEEDAKESRRVVEEAVKRDEDIARDIERAAREVVERDKEIVDEVRRGVKDEKKLREVVTLSKKIVDETKEIADRVLELSKRIVKETRDIAKRVLKLNDDSVKDVRRIAREGRSKETKDLLDENSKRSNEISREVKKDLERTVRENKKIVDEVAKALEDTVDKNRRIVEEVTT

SEQ ID NO: 12849 - protein, 181 aa, Artificial Sequence; identical to SEQ ID NO: 12848
  Synthetic

SEQ ID NO: 12850 - protein, 185 aa, Artificial Sequence
  Synthetic
SEAEELLKRLEDRAEEILRRLEEILRTSRKLAEDVLRELEKLLRESERRIREVLEELRGIKDKKELEDVIREVEKELDESLERSRELLKDVLKKLDDNLKESERLVEDIDRELAKILEDLKKAGVPKEVVDEIKRIVDEVRERLKRIVDENAKIVEDARRALEKIVKENEEILRRLKKELRELRK

SEQ ID NO: 12851 - protein, 185 aa, Artificial Sequence; identical to SEQ ID NO: 12850
  Synthetic

SEQ ID NO: 12852 - protein, 172 aa, Artificial Sequence
  Synthetic
SRAETVLKEVTDKIKKLADSSDELLRRNKENIDELKKSSEELLRRLTKAIEEIEKGSVDEETLEELIRRVEAELEAHHRELEKNSREDEKRNRDHHAKLEEEMRRVEERLEREGIDDEVVKRVRDLLDTVRRRNEKVNEDVKRMNDKLRRDNEDVIRRVEKLLRELEEKRRT

SEQ ID NO: 12853 - protein, 172 aa, Artificial Sequence; identical to SEQ ID NO: 12852
  Synthetic

SEQ ID NO: 12854 - protein, 172 aa, Artificial Sequence; identical to SEQ ID NO: 12852
  Synthetic

SEQ ID NO: 12855 - protein, 172 aa, Artificial Sequence; identical to SEQ ID NO: 12852
  Synthetic

SEQ ID NO: 12856 - protein, 177 aa, Artificial Sequence
  Synthetic
DEVRELLERNRRLLEEIKKTVKDLIRANEELLKRIEDDAKRLIDRNEELLDELEKGLSDDETIREAKERLKASLEDVKRRVEEVKRLLEKSLEEVETIIREAEKRNRDSLREMERRGSSEELEELRRVVEESDETIKRLLEEAKESVDRSLDRIRKLLEDVRRSVERSAKRIDEKRK

SEQ ID NO: 12857 - protein, 177 aa, Artificial Sequence; identical to SEQ ID NO: 12856
  Synthetic

SEQ ID NO: 12858 - protein, 180 aa, Artificial Sequence
  Synthetic
STEEVLDEIRKLHKTLTEDIKRVLREIEELHRRTIEENKEVLDKIAEDYKRVIDDVRTKDTPNVEKLLKDLEKSAKENIEHNERTLREDDRVLKEIRRRATELLKANEEMLRRIEEVARKGGVDAEELLRESKEAIKEVKRVLEELRKESKRVVDETRKLSEENLEHSERVLRKVEEDLR

SEQ ID NO: 12859 - protein, 180 aa, Artificial Sequence; identical to SEQ ID NO: 12858
  Synthetic

SEQ ID NO: 12860 - protein, 188 aa, Artificial Sequence
  Synthetic
SEIEKILKEIEDLARRDEEVSKKIVEDIRRLAKEVEDTSRDIVRKIEELAKRVLDRLRKDGSKEELEKEVREVVKTLEELVKDNHRLIRRAVEEMKRLVEENHRHSREVVKELEDLVRELRKGSGSEDSERLVREVEDLVRRLVRRSEKSNEEVKRTVEELVRRMEESNDRVRDLVRRLVEELKRAVD

SEQ ID NO: 12861 - protein, 188 aa, Artificial Sequence; identical to SEQ ID NO: 12860
  Synthetic

SEQ ID NO: 12862 - protein, 178 aa, Artificial Sequence
  Synthetic
SEAEKAKETIDRLADRVRKLLEEIKRSLDDSRRKSKETVEENEKTLDRMRKEVDAAKRGSVSEEELERLIRKLKKTLDELRRRHEKLVEDLRRNLERIKRRLEELTREMRETLERLAREGLDEEVLRTLEEIIRRLTKELEDVLREYERELRRLEEENKRVIDKTEEEIRRLADRLRR

SEQ ID NO: 12863 - protein, 178 aa, Artificial Sequence; identical to SEQ ID NO: 12862
  Synthetic

SEQ ID NO: 12864 - protein, 178 aa, Artificial Sequence; identical to SEQ ID NO: 12862
  Synthetic

SEQ ID NO: 12865 - protein, 178 aa, Artificial Sequence; identical to SEQ ID NO: 12862
  Synthetic

SEQ ID NO: 12866 - protein, 179 aa, Artificial Sequence
  Synthetic
SEVEELIKRLAKVLKELVDKVRKVIEDTKELLERLKRRSEDHIRKLREVLKEAKDQPIDDEELKEILDRLRKTLEELEEELKKALEDDREEAKRLVDDARRVLKELEEEVREIRERRGESEELDRRIEKVLKEIEEKIREVIKEWERVHREVEELLKRLIDENRKVLDEIRKLLEEKSK

SEQ ID NO: 12867 - protein, 179 aa, Artificial Sequence; identical to SEQ ID NO: 12866
  Synthetic

SEQ ID NO: 12868 - protein, 179 aa, Artificial Sequence; identical to SEQ ID NO: 12866
  Synthetic

SEQ ID NO: 12869 - protein, 179 aa, Artificial Sequence; identical to SEQ ID NO: 12866
  Synthetic

SEQ ID NO: 12870 - protein, 182 aa, Artificial Sequence
  Synthetic
SELEEIEKKVRELTKRHRELVERVRKTVKELIETNRRLLETLTERIKRVLEEVRDLERRGEPKEDLKARLEDIIRRLAEDIERVKRETDKLLEELARIIEEVEKEMRETNKELDKEIKDGGLDDKALEEAKRVLAENNEVIKDIKRALDELLKELEKSVRESEERLRRLLEEVKRVIEEVAT

SEQ ID NO: 12871 - protein, 182 aa, Artificial Sequence; identical to SEQ ID NO: 12870
  Synthetic

SEQ ID NO: 12872 - protein, 186 aa, Artificial Sequence
  Synthetic
SEAERLEARARELLRANEELMDDLRAKAEELLKRNDRLVKEIEKKVREVLAAIEELKRRGEPKEEVARKIEEILRRLEETLRRIKEESDRLDEELKRELERVKRESEELDRELRKLIEDVERRGSGSKRLEELLRRLNEEHKRISDELRKLLDEALEAHRELSRRLEEELERLLREIERLVEEVTR

SEQ ID NO: 12873 - protein, 186 aa, Artificial Sequence; identical to SEQ ID NO: 12872
  Synthetic

SEQ ID NO: 12874 - protein, 176 aa, Artificial Sequence
  Synthetic
SVDEVLKEIEDALRRLKEEVERVLKENEDELRRLEEEVRRVLKEDEELLESLKRGVGESDEVDRVVDEIAKLSAEILEKVKKVVKEIRDSLETVKRRVDDVVRRLKELLDEIKRGSDEKAIRDVAKEIRDRLKELEEEIEEVTRRNLKLLADVEEEIRRVHEKTRRLLETVLRRAT

SEQ ID NO: 12875 - protein, 176 aa, Artificial Sequence; identical to SEQ ID NO: 12874
  Synthetic

SEQ ID NO: 12876 - protein, 184 aa, Artificial Sequence
  Synthetic
DDLERAREEVADLIRKHEEKTRRILEESRRLNERHRELSARILDEIRKLAERIEELIKRERGKDELRRKVEDLEARVEDLIRRLEEHLRRVHDKDRRLIEDLRRHLKRVVEELKRLIDELRRGVPKEELDRIEEELKRLIDTLREKNREVEKRARDSNRDLKRTNDEIAKEVRELIKKLREDLK

SEQ ID NO: 12877 - protein, 184 aa, Artificial Sequence; identical to SEQ ID NO: 12876
  Synthetic

SEQ ID NO: 12878 - protein, 174 aa, Artificial Sequence
  Synthetic
KEVEDAVKELEDLLRANEDKTRSIVEDMRASNKDLEDHSRASEEEVRKLLDDLRRAGVPRDSLKRLAEDVERVTRESRELLERVHRADRELIERLKESNERLRRAIEEIRKAIKGGSDIKTLLDRVRKLAEEDAERLDRLRRESEELNERVRRVDKKLLEEIRRKAKKVEDDTR

SEQ ID NO: 12879 - protein, 174 aa, Artificial Sequence; identical to SEQ ID NO: 12878
  Synthetic

SEQ ID NO: 12880 - protein, 174 aa, Artificial Sequence; identical to SEQ ID NO: 12878
  Synthetic

SEQ ID NO: 12881 - protein, 174 aa, Artificial Sequence; identical to SEQ ID NO: 12878
  Synthetic

SEQ ID NO: 12882 - protein, 174 aa, Artificial Sequence
  Synthetic
DEEEDLERAIKKLLDENRELLKRIAEELRRLLEELRRLTEESADRLRRLLKELKDRGVPEEDLADVAEKVKKVLKESEDSNADVARKLEKLLRDLERSTERLEREARKVRKLLRGGKDAETLLRELEKLSRDNKELLKKIEKEIRDLIKEDKERNIELSERLRKLVEELKKKAT

SEQ ID NO: 12883 - protein, 174 aa, Artificial Sequence; identical to SEQ ID NO: 12882
  Synthetic

SEQ ID NO: 12884 - protein, 174 aa, Artificial Sequence; identical to SEQ ID NO: 12882
  Synthetic

SEQ ID NO: 12885 - protein, 174 aa, Artificial Sequence; identical to SEQ ID NO: 12882
  Synthetic

SEQ ID NO: 12886 - protein, 178 aa, Artificial Sequence
  Synthetic
DDAERILREMERLLEENKEISDEIAKELKRLLDENRKLSEDVVKALEDLLRDLERRSGVSEEVLKRVREVLERIKRELDRSDDELRKVAERILRDAERSNDELRKVIEEIEEELRGSRDKDTLRELARSIRKLSAENKERLKELLRELKKLSDENKERIKKLLSDAEKIIEDVARRAK

SEQ ID NO: 12887 - protein, 178 aa, Artificial Sequence; identical to SEQ ID NO: 12886
  Synthetic

SEQ ID NO: 12888 - protein, 177 aa, Artificial Sequence
  Synthetic
SSEERLRAVIEDLKRLAEESRKRHKELIDELAKAVERIERRHKKLLDEIKAVVDDIRRGVSEELLKRIEEVLDEIRKELEENIKRIRKVLDELRRTSEENIARIEKVLRELEDLVRKGGSDADTIIEEVKRVLEELARSTEEVEKRVRDAIEELERSSEELARRIKEVLKRLEEETR

SEQ ID NO: 12889 - protein, 177 aa, Artificial Sequence; identical to SEQ ID NO: 12888
  Synthetic

SEQ ID NO: 12890 - protein, 178 aa, Artificial Sequence
  Synthetic
DEARELVKELEDLIREITKTVRRLLEESEELIKRIDDAVDDLRRADEDLNREIKEEIEKGKSKESLEALIERLKESLERVKRTIEKLIRDLERLNEKLRRDVESLVAELEKILSKIKRGGLDERILRELEERVKELEKEAREILKRSEDETDKLREKAERILEDLERANRRTMDEARR

SEQ ID NO: 12891 - protein, 178 aa, Artificial Sequence; identical to SEQ ID NO: 12890
  Synthetic

SEQ ID NO: 12892 - protein, 178 aa, Artificial Sequence; identical to SEQ ID NO: 12890
  Synthetic

SEQ ID NO: 12893 - protein, 178 aa, Artificial Sequence; identical to SEQ ID NO: 12890
  Synthetic

SEQ ID NO: 12894 - protein, 184 aa, Artificial Sequence
  Synthetic
DEIRKVVKEITDLLKASNDKNRKVVEEIRDLLRKSKKLADELVERLRALVEDLRRRIDKSGDKETAEDIVRRIIEELKRILKEIEDLARRINREIERLVEEVERDNRDVNRAIEELLKDIARRGGSEDLKRVEERAREVSRRNEESMRRVKEDADRVSEANKEVLDRVREEVKRLIEEVRETLR

SEQ ID NO: 12895 - protein, 184 aa, Artificial Sequence; identical to SEQ ID NO: 12894
  Synthetic

SEQ ID NO: 12896 - protein, 184 aa, Artificial Sequence; identical to SEQ ID NO: 12894
  Synthetic

SEQ ID NO: 12897 - protein, 184 aa, Artificial Sequence; identical to SEQ ID NO: 12894
  Synthetic

SEQ ID NO: 12898 - protein, 176 aa, Artificial Sequence
  Synthetic
STAETVEKKVEEVIRENEKSMRESEEKVDRSTKRIEDVLRRLEETIRKTSDDIAKGVKGERVKEVLEENRRLLEEAKKLVDEVLETNKKLLEDDKRLNEEVSKTLKKLLEEIKSVDTREDATRVIEEAKRILDEARKLNEETIRRSEELVRRIERVIEEIIKRSEKLLEDVARESK

SEQ ID NO: 12899 - protein, 176 aa, Artificial Sequence; identical to SEQ ID NO: 12898
  Synthetic

SEQ ID NO: 12900 - protein, 176 aa, Artificial Sequence; identical to SEQ ID NO: 12898
  Synthetic

SEQ ID NO: 12901 - protein, 176 aa, Artificial Sequence; identical to SEQ ID NO: 12898
  Synthetic

SEQ ID NO: 12902 - protein, 176 aa, Artificial Sequence
  Synthetic
STAETVAEEVERVLKHSDDLIKEVEDVNRRVEEEIKRVIRELEEENERLVAEVRKGVKGEILAEIEKRLADNSEKVREVAERAKKLLEENTARVKDILRESRKLVKDLLDEVRGTGSEEAAREIIKRLREVNKRTKEKLDELIKHSEEVLERVKRLIDELRKHSEEVLEDLRRRAK

SEQ ID NO: 12903 - protein, 176 aa, Artificial Sequence; identical to SEQ ID NO: 12902
  Synthetic

SEQ ID NO: 12904 - protein, 176 aa, Artificial Sequence; identical to SEQ ID NO: 12902
  Synthetic

SEQ ID NO: 12905 - protein, 176 aa, Artificial Sequence; identical to SEQ ID NO: 12902
  Synthetic

SEQ ID NO: 12906 - protein, 182 aa, Artificial Sequence
  Synthetic
DEVREVAERLRRLVDESRKRNEEVIKESEALVDRVRKTNEEVMKRLRELIDKLEKDIRRSGDKETVEKIIREVLSAIDELLKRVERTNAEISKENARLLDEVRKTNEEISRRLAKLLEDIRRGSGDAETIERVVRELLEENKEVLRKTEEAVKRSTETNKRLLEASKEVADRLRERIKEAAK

SEQ ID NO: 12907 - protein, 182 aa, Artificial Sequence; identical to SEQ ID NO: 12906
  Synthetic

SEQ ID NO: 12908 - protein, 186 aa, Artificial Sequence
  Synthetic
SRVEEIIEDLRRLLEEIRKENEDSIRRSKELLDRVKEINDTIIAELERLLKDIEKEVREKGSESEEVKKALRAVLEELEKLLRRVAEINEEVLRRNSKLVEEDERRNREVLKELARLVEELIREIGDEDKARKVAEVAEKVLRDIDKLDRESKEAFRATNEEIAKLDEDTARVAERVKKAIEDLAK

SEQ ID NO: 12909 - protein, 186 aa, Artificial Sequence; identical to SEQ ID NO: 12908
  Synthetic

SEQ ID NO: 12910 - protein, 186 aa, Artificial Sequence; identical to SEQ ID NO: 12908
  Synthetic

SEQ ID NO: 12911 - protein, 186 aa, Artificial Sequence; identical to SEQ ID NO: 12908
  Synthetic

SEQ ID NO: 12912 - protein, 186 aa, Artificial Sequence
  Synthetic
SEVDEIIKELERLLAEIARENERIIRESRKLADEVRKRNEDAIRKLEELVARLADAVRRKGSESEEVKKLIEDVLREIERLLKRIEEENREVVKRNSELVERVRAINEEILRRVAELVEKIARDIGDKDEVTKVKKVADDVLAEIKKLDDETRRVIEDTNKKIADLDKATRDVVRKVLEEVKKLEK

SEQ ID NO: 12913 - protein, 186 aa, Artificial Sequence; identical to SEQ ID NO: 12912
  Synthetic

SEQ ID NO: 12914 - protein, 180 aa, Artificial Sequence
  Synthetic
REVEEMIKELEELLKDLKEKNERASKRNRELVRRLEEENKRVIEELKKLVKELEDLVRSGEDEEVLREVLKRLEEVLERVRALNERVLEAIEKSLEEVKASNEAVKRRLKELLEEAERGVDSEKLKELRDVIAEVAKRIDELDEYTRESIRRAKKEIERLNRETKKVIEEVVKRIEEERK

SEQ ID NO: 12915 - protein, 180 aa, Artificial Sequence; identical to SEQ ID NO: 12914
  Synthetic

SEQ ID NO: 12916 - protein, 180 aa, Artificial Sequence; identical to SEQ ID NO: 12914
  Synthetic

SEQ ID NO: 12917 - protein, 180 aa, Artificial Sequence; identical to SEQ ID NO: 12914
  Synthetic

SEQ ID NO: 12918 - protein, 181 aa, Artificial Sequence
  Synthetic
DAVEEAEKLIRKVIADSEKLLRDLADLNAKSIRRSEKLVEDDRRANEDVIRKLEELRRNGGSEEELRALLKEVEDTNRASHETNKRLLDEDRALNKEVHDRNEKLLRDIKRLVEEVAKGIDSEELLRRIKKLLDEIKKAIEDSSREIKRLLEESERVMKRSSEDIKRTLDDTRRVVEEVRR

SEQ ID NO: 12919 - protein, 181 aa, Artificial Sequence; identical to SEQ ID NO: 12918
  Synthetic

SEQ ID NO: 12920 - protein, 181 aa, Artificial Sequence; identical to SEQ ID NO: 12918
  Synthetic

SEQ ID NO: 12921 - protein, 181 aa, Artificial Sequence; identical to SEQ ID NO: 12918
  Synthetic

SEQ ID NO: 12922 - protein, 177 aa, Artificial Sequence
  Synthetic
SSDEVLKEIEEIIRRLEAEVRRVNAEVNASTEDLAREVEEVLRATNELIEELERRVTGTEELKRVIDELRDRDRKVRRRVERVIEESAKRDDESRKRLTRAVEKLRADLKKLADDGVPEEALSKAIKDVRDIVKKVKDELKEWRDRNKELVDRLSEELKEWLKDVERVLKELTDKDR

SEQ ID NO: 12923 - protein, 177 aa, Artificial Sequence; identical to SEQ ID NO: 12922
  Synthetic

SEQ ID NO: 12924 - protein, 175 aa, Artificial Sequence
  Synthetic
SEADDVLKKLAETVKRIIERLKKLTDDSRRLVEEVHRRNDKLSKESAEAVRKAEERGIDEKDVRKLLEDLKKKSEEVAERNKRILDTLREISKRAEDEVRKVLKELEKTLKELEDRRPDSEELSAEVKKLLDEVRKALARHKDENDKLLKEIEDSLRRHKEENDRLLEKLKESTR

SEQ ID NO: 12925 - protein, 175 aa, Artificial Sequence; identical to SEQ ID NO: 12924
  Synthetic

SEQ ID NO: 12926 - protein, 175 aa, Artificial Sequence; identical to SEQ ID NO: 12924
  Synthetic

SEQ ID NO: 12927 - protein, 175 aa, Artificial Sequence; identical to SEQ ID NO: 12924
  Synthetic

SEQ ID NO: 12928 - protein, 185 aa, Artificial Sequence
  Synthetic
SEIDEVLTRLRKISKDLNETSDRVNERARKIIDDIKKESKRVNDEAREIVERLKREIDKTRDRDVLRRILKEIEDVARRVKEINEELLARVEKVVREVEEINRELVKRSREAVEAVKRLLDRGVSDEDKVERVVREVEKLHEEDRKRLEESTRSVRKLLEELKRELEKSTRSVKALVDELRERVR

SEQ ID NO: 12929 - protein, 185 aa, Artificial Sequence; identical to SEQ ID NO: 12928
  Synthetic

SEQ ID NO: 12930 - protein, 185 aa, Artificial Sequence; identical to SEQ ID NO: 12928
  Synthetic

SEQ ID NO: 12931 - protein, 185 aa, Artificial Sequence; identical to SEQ ID NO: 12928
  Synthetic

SEQ ID NO: 12932 - protein, 175 aa, Artificial Sequence
  Synthetic
SEAEEIRRRLEEISRRSVEHLRKVLEEIKRISERSKRHLDRVLEENARRLEELAELLKRGGDKEELLADLKAVHDESRKVIEKNAEENDRALKAAKEVIDENRERNKRVLDEVRKGGLPEEVLRELEELLKESEERIKRIEEEIKKIIDKSREDIKRVLEEIERLNAKAADDLRK

SEQ ID NO: 12933 - protein, 175 aa, Artificial Sequence; identical to SEQ ID NO: 12932
  Synthetic

SEQ ID NO: 12934 - protein, 181 aa, Artificial Sequence
  Synthetic
SEVDDVLRRLEELIKTLEDINAKSLEDIKKLIDDLAKILEDALRKHEKLIRELREAKKGIDSREAEEIAKRVLEELKRTSDDLRKKVERVDEDLRRLLRENHERNKKILRDLERLLRDAARRGVPKEALDRMREEIRRLEEESRKSDETIERLIRELRRRVEEVLKTSTDLIRELEEEVKK

SEQ ID NO: 12935 - protein, 181 aa, Artificial Sequence; identical to SEQ ID NO: 12934
  Synthetic

SEQ ID NO: 12936 - protein, 181 aa, Artificial Sequence; identical to SEQ ID NO: 12934
  Synthetic

SEQ ID NO: 12937 - protein, 181 aa, Artificial Sequence; identical to SEQ ID NO: 12934
  Synthetic

SEQ ID NO: 12938 - protein, 178 aa, Artificial Sequence
  Synthetic
SDAEELLKRVADLLKASLESLEKILRDSKELMDRWRKKLEDLLRESEELVDRAEKILRRGGSDKEVLDKIAEEVRRTNDDSRRLDEELHRLSRDTLRKLEENLRRTEKEVREMDKRAAERGVDERVREELKKLLTRVEEEHRKVLETDKKILKEAHKESKEVNDRDRELLERLEESVR

SEQ ID NO: 12939 - protein, 178 aa, Artificial Sequence; identical to SEQ ID NO: 12938
  Synthetic

SEQ ID NO: 12940 - protein, 178 aa, Artificial Sequence
  Synthetic
DAAERAKEKLDKILEDLRDVVRASKENLDRLHAENAETLERSKANLDRLLEKVKKDGVPEELLKELERIIRDLKRKHAKLLEDHRKIIEELKREHDRLLKEAEEIVRRIKDELEKGSDDERDIERILRELEAVLKKLTDESERLNREVERVSRDTKKKSKELNEELKAVLDEVKRKAD

SEQ ID NO: 12941 - protein, 178 aa, Artificial Sequence; identical to SEQ ID NO: 12940
  Synthetic

SEQ ID NO: 12942 - protein, 181 aa, Artificial Sequence
  Synthetic
SEIETVRREIEKILDDLRRTVKRIEDEVRKIHEDLRRSLEDSKRNIEEILKDLERAARRDGLDKKVEDDMRKLVEDLKRKHDKLRADNEAVTKELKDRLKKLEDDLARAIEELRRRLDKGLDKEDIDKLLKELRDLVEKIKKDLKELLERYEEIVRRIKELLKDLNREAEEVVRRLKEELR

SEQ ID NO: 12943 - protein, 181 aa, Artificial Sequence; identical to SEQ ID NO: 12942
  Synthetic

SEQ ID NO: 12944 - protein, 174 aa, Artificial Sequence
  Synthetic
KELEDVIEEVKKLLKTVNEESRRVAEEVRKLIREVSEELTEVIRRVERLVEEVAKGVDSEEALDAVRKRIEELVRRVEEVNAASKRRIEELEDELRKVDEESRETIERLIDLLRRGLDAETVLRSAEDIVAKNRKLAEEVLRRVKKIVEENRKIASEVLDDVRKLVEDVLARAS

SEQ ID NO: 12945 - protein, 174 aa, Artificial Sequence; identical to SEQ ID NO: 12944
  Synthetic

SEQ ID NO: 12946 - protein, 183 aa, Artificial Sequence
  Synthetic
SKLEEVEKAVRKVIEDSRRVNEEVNRRSEEVVRELEKVHREVNDASRRVVEKARRVLKGSGDERLAAEVERIIEEIRELNERDRKRVEEIRKEIEDLNRDLNRRSKESEDRLRKLLEDATRGGVTKEADEVVERAERISEENKRRVEDVARKSKELVEDVRRHSEEVVRRVEELVKEVEERVR

SEQ ID NO: 12947 - protein, 183 aa, Artificial Sequence; identical to SEQ ID NO: 12946
  Synthetic

SEQ ID NO: 12948 - protein, 183 aa, Artificial Sequence; identical to SEQ ID NO: 12946
  Synthetic

SEQ ID NO: 12949 - protein, 183 aa, Artificial Sequence; identical to SEQ ID NO: 12946
  Synthetic

SEQ ID NO: 12950 - protein, 173 aa, Artificial Sequence
  Synthetic
SAEEVKEELKRIATKLKEEIKENIRRLEESVEKIAKELAENIKRLEDILRDVKRGLRDERIVKTVEDIARRVVEDNERIMEEDKDVVRRLVERNEEIVRRVDETVKKIVELIDRGEPGEELVERLRRVVEEVRERLKDSSRELRKINEDSRKAVEDSSAEVAKVVEELERRDT

SEQ ID NO: 12951 - protein, 173 aa, Artificial Sequence; identical to SEQ ID NO: 12950
  Synthetic

SEQ ID NO: 12952 - protein, 175 aa, Artificial Sequence
  Synthetic
SEIERVKKRLEELLAEVEESTRRLEERLKRLLEEAKRSSEEVEKELRRLLEAVRRGLSRDEKLVSELEARVKELLEDSRASLEELKKRVRKLAEDSARLLEEVKREVEKLKAKLDRGGDADDVLARVEELAKRAHDENERLIREVEELVRAHNKRNKELVDEVKRLVEKVIEEER

SEQ ID NO: 12953 - protein, 175 aa, Artificial Sequence; identical to SEQ ID NO: 12952
  Synthetic

SEQ ID NO: 12954 - protein, 175 aa, Artificial Sequence; identical to SEQ ID NO: 12952
  Synthetic

SEQ ID NO: 12955 - protein, 175 aa, Artificial Sequence; identical to SEQ ID NO: 12952
  Synthetic

SEQ ID NO: 12956 - protein, 183 aa, Artificial Sequence
  Synthetic
SDVDRVLEEIRKLLEDLKRHSEKVSEENEDLLRANTELNKRVSEDNERLLEELKRLRERGGISEEDLKRALDRVRKTVETVKEENKRSLEDVRRTVETNKRKLERVVEEIKKLIEDAKRRGSGDEEAKKKLDEVLERAKRTIDRLLETSDRSLEKVEADLRRLNEELDRSLERAERTIRELAK

SEQ ID NO: 12957 - protein, 183 aa, Artificial Sequence; identical to SEQ ID NO: 12956
  Synthetic

SEQ ID NO: 12958 - protein, 183 aa, Artificial Sequence; identical to SEQ ID NO: 12956
  Synthetic

SEQ ID NO: 12959 - protein, 183 aa, Artificial Sequence; identical to SEQ ID NO: 12956
  Synthetic

SEQ ID NO: 12960 - protein, 173 aa, Artificial Sequence
  Synthetic
STEDVLRKIKEDVKRVIDDNRRILDEVRRTSKRVLDDLRANLKHIAEEVERVLRGSDSEEVVRELAKILDEIREEHRRLIRTNEKVLEDIERDHRRISEELKRILDEVDELLRGGKPSKELLEKAKAVVDEIKRLAEESLKRLEDLSRDHKRRAKELNDEIAKVVDELAKRAT

SEQ ID NO: 12961 - protein, 173 aa, Artificial Sequence; identical to SEQ ID NO: 12960
  Synthetic

SEQ ID NO: 12962 - protein, 180 aa, Artificial Sequence
  Synthetic
SAEELLREVAELVKRVDEDLRRLLEEVRASNEEVIRRLEEILKRIEEENRKVVEELRRGGVSEDLVRESKRLVDESRRVIEKLVKESADSVERTRETVDRLREELKRLVEEIAKMVKGGSSEETVKRLLDELRELLERLKRTIEELLKRNRDLLADAEEKARRLLEENRKLLKAARDTAT

SEQ ID NO: 12963 - protein, 180 aa, Artificial Sequence; identical to SEQ ID NO: 12962
  Synthetic

SEQ ID NO: 12964 - protein, 177 aa, Artificial Sequence
  Synthetic
SEDEDLDRVAEKLAREHKKSVEEIKRVLKSADEESKKLVRDTERVIEEIKREVEEARRGNIDEELVERLKKKIEDILRTLEERHKKLIKELREILKRLSDESRRLAEETEKVLEDLERKGVDEEVLKKLAEIVRRVKEENRKVNEEVEKRLRELEEENKKVIEDLKSTVEELVERLR

SEQ ID NO: 12965 - protein, 177 aa, Artificial Sequence; identical to SEQ ID NO: 12964
  Synthetic

SEQ ID NO: 12966 - protein, 177 aa, Artificial Sequence; identical to SEQ ID NO: 12964
  Synthetic

SEQ ID NO: 12967 - protein, 177 aa, Artificial Sequence; identical to SEQ ID NO: 12964
  Synthetic

SEQ ID NO: 12968 - protein, 180 aa, Artificial Sequence
  Synthetic
DEVEDVLRKIEKILDDHRKRIEKNSRDMARIIDEHRRKVEENSREMKKLVDDLKKAVDRGEGDEETAEDVKAKLEKSNRELEKHSEEVKRALDESNEDLRRHSEEVKERIERLVKKLREDGVEREEELKEVADRVKEKLDRLNRENEKSSEELKRELDKINDENRETSERLKREIDETTR

SEQ ID NO: 12969 - protein, 180 aa, Artificial Sequence; identical to SEQ ID NO: 12968
  Synthetic

SEQ ID NO: 12970 - protein, 177 aa, Artificial Sequence
  Synthetic
SKEDRLREELKKLLARLAEEIERLKRALEESNKDLKRTIDASEKHLRDVNEDVKRGGVSEELLRELERSTAENKERAKELLKRHEDLVRKVEKELADLLRRLEEIVARVDEALKRGISEEELDKLLKEARDLIREIEKRLEELLKRVEKLTEDAKRDLERSNREHKELADRIKETAR

SEQ ID NO: 12971 - protein, 177 aa, Artificial Sequence; identical to SEQ ID NO: 12970
  Synthetic

SEQ ID NO: 12972 - protein, 177 aa, Artificial Sequence; identical to SEQ ID NO: 12970
  Synthetic

SEQ ID NO: 12973 - protein, 177 aa, Artificial Sequence; identical to SEQ ID NO: 12970
  Synthetic

SEQ ID NO: 12974 - protein, 185 aa, Artificial Sequence
  Synthetic
SSVEELLERLRRISEENKRRIEKLLREVEKVLRELKDRHRKLLKRVEEIIRKVKEEIKSGLPEEAVKRVLERVRERVKEVLEEADRLNDEMRRIVTEVEKELDKSDKEVEDAVRDILKKIEEGVRDRETAERARETLKRLLDENRDRSKKVKEEIRRILEDLTRTTERVKREIAKLLKELEDTAR

SEQ ID NO: 12975 - protein, 185 aa, Artificial Sequence; identical to SEQ ID NO: 12974
  Synthetic

SEQ ID NO: 12976 - protein, 185 aa, Artificial Sequence; identical to SEQ ID NO: 12974
  Synthetic

SEQ ID NO: 12977 - protein, 185 aa, Artificial Sequence; identical to SEQ ID NO: 12974
  Synthetic

SEQ ID NO: 12978 - protein, 180 aa, Artificial Sequence
  Synthetic
SELEEVLRRIEALVRKAHKENEDVLREIERLVRTAHRLNKKVDDDSAKIAEDLKRGGREDKDKVEEALRRLRELYRRLEEENRRILREIEELVKELEKRNREILKELEDLVADAERKGSDGSEAVRRLKEILERLKEEVRRSLEELRKEVERLKKEVEDSLRELKKSLEEWVKSLEEATR

SEQ ID NO: 12979 - protein, 180 aa, Artificial Sequence; identical to SEQ ID NO: 12978
  Synthetic

SEQ ID NO: 12980 - protein, 180 aa, Artificial Sequence; identical to SEQ ID NO: 12978
  Synthetic

SEQ ID NO: 12981 - protein, 180 aa, Artificial Sequence; identical to SEQ ID NO: 12978
  Synthetic

SEQ ID NO: 12982 - protein, 172 aa, Artificial Sequence
  Synthetic
SKEEELEKLLREHHEKIKRLKEESKRINDRIRRTVEELIKESEKINRDINDTVRKGDRDEEVIRRLLEDVRRKHEELRERLKRELDKVRERHKELLDRARRATEAVKERLDRGGLSEDSVERIARELERNLDDLARVLKESEDDLAEILRRLKEVLEESERDLERVEREVRK

SEQ ID NO: 12983 - protein, 172 aa, Artificial Sequence; identical to SEQ ID NO: 12982
  Synthetic

SEQ ID NO: 12984 - protein, 252 aa, Artificial Sequence
  Synthetic
SEAEEAAERAKRAAKEAVERAKRAVERNEEAARRAAEKAREATERAERAARRAADKARKATDRRALRDAAKELEDAARENADALRKAIEDLARATDEAIKAAREAAKRLKDAAKEALDAARRTARDEDAERILRELKEAIERAARRLDRLLREWEKAAERIKRDAERLLEEWERAAEKIRKELEDIDRKAKDIKDAADKLAEAAKRAVDISKKAADDLKRLAKEDNEIAREAARRLAEAAKEAVKLVDDVTR

SEQ ID NO: 12985 - protein, 252 aa, Artificial Sequence; identical to SEQ ID NO: 12984
  Synthetic

SEQ ID NO: 12986 - protein, 233 aa, Artificial Sequence
  Synthetic
SEKEKAAEDLRRAIEEAKKRSEEAAKELEDALRKAEKEARDSAETLKEAAKRAADAGAPEEALRALEEAIKKAIKASKDALDALREAIKESIDSNREALKALKEAVERAEEGGDREIARRAAERAREAAKRAAEKNKRAARKAEEAAKRAVDEHRKAAKEAREAAERAVRKAEDKDAATEAKKAADTIAKLIEDNAKRALEAAREIAKLIEKSAKEALEAAERIARLIEEAAN

SEQ ID NO: 12987 - protein, 233 aa, Artificial Sequence; identical to SEQ ID NO: 12986
  Synthetic

SEQ ID NO: 12988 - protein, 234 aa, Artificial Sequence
  Synthetic
SVEEAARRAAKALKDAAKKLLEANEKAARAWKELAKELIKADEKALKILEEAARKARRDGPDKEIEKELRKAAREYEEIIKDLREKAKKVLEEYRRIVKKLEEDLKRALDKLREDGVKKDALDAARRAAELLAEAAKKAAKAHEEAARLLAKAAEDSARAAKEAAELLRRALEENKRAEEAAKEAIRIAEEALRRSAEAAERAARIAEDAARKSRKAAEDAAKIAKEAADRARK

SEQ ID NO: 12989 - protein, 234 aa, Artificial Sequence; identical to SEQ ID NO: 12988
  Synthetic

SEQ ID NO: 12990 - protein, 239 aa, Artificial Sequence
  Synthetic
SEEDRLRELAERARRLAKRNRELAKEIIDEIRKLIRDAREAAKKSAEKAKRLIDDARRVAGKPTDRKIVETLARRSAKANEENARLIKRLAEEAIRAAKKAADADRKSAKEVIDALKRIAEDLQAREAADAARRAAKIAKEAADEAIKAWEDAARIAERAARKSIEANKRAIKIAREAAERNAIEEAAKANEEAIKASEEAVDEAARALEEAAEASKRANEKADKALEDAVRAAEEATR

SEQ ID NO: 12991 - protein, 239 aa, Artificial Sequence; identical to SEQ ID NO: 12990
  Synthetic

SEQ ID NO: 12992 - protein, 238 aa, Artificial Sequence
  Synthetic
SEKEDVLRRIREAHERNKRLLERVAEEIKRIVEESRKLLEDVRKKAEDAARRAEEALRKEARDDEKAAEELAKILEDLARLLEEAARRNAKLLRDIAELVKRAAEENAKSNEEIARLLKEAGADDTAAKKVKEAADESLKAAEEAAKKIEEAARKSLEAARRAAEKIKRAAEKAREAAREKAKEALLKAAKEALEALEEALRLIAKATEEAARAAKEALDLILEADRKSAKAAEEALR

SEQ ID NO: 12993 - protein, 238 aa, Artificial Sequence; identical to SEQ ID NO: 12992
  Synthetic

SEQ ID NO: 12994 - protein, 238 aa, Artificial Sequence
  Synthetic
SEREEVAKRATDAHEENERLLREVEKRIKEALERNEELLKRVSDKAREAAKKLEDALRRRARDDERAAEELVKALEDLARLIEEAAKRNAESLREIAKLVRRAAEENAKSNKDLAKLLKDAGADDDAARKVKEAAEESLKAAEEAVKKIEDAARKSLKAAKEAAEKIRKAAEEARRAAEERAKEALRRAAKKALDAAEEALELIRKASKEAADAAREALKLILEADKKSLEAAREALR

SEQ ID NO: 12995 - protein, 238 aa, Artificial Sequence; identical to SEQ ID NO: 12994
  Synthetic

SEQ ID NO: 12996 - protein, 244 aa, Artificial Sequence
  Synthetic
SEREEIEEIKKRVDRTLEEYERKVEDIRRKLTELKDESDKKVKDVRRKLKETEDRVREEGSSEVIERIIEDVKKILEDLVRVHRESLDTAVRIAEELVRVARESIKRVKEILRELAEASKTKDEEKLREILERVKEKLKKIIDDNREVLKRVEEKVKEIIKRNKDVNDRVREELKRLAEELERANVEELRELIERLVRIAEEVSEEDERVLRSLEDILRKVVEENERLLERLKRILEELIRRTR

SEQ ID NO: 12997 - protein, 244 aa, Artificial Sequence; identical to SEQ ID NO: 12996
  Synthetic

SEQ ID NO: 12998 - protein, 245 aa, Artificial Sequence
  Synthetic
SEDEELKKELEKLLKELEEKLEKYRDDLRKDKERLKEKLDRYRERLRELMEELKDLLDKRVRAKELLDRIREIIKESADANRELLEEIRKTLEKSKRMNEELLKKIKEIIERIEERLRKRGVPEEVLRTLAEKARRLLEELKKESERIVREAEEILKRIEEELREVHKELEEILRRIKRKLDEETSEDVLRDIVRRVVEVLRKNLKIVEEIIRKIEELLEKNLRLVEEILRRIARLLEEVLEKTR

SEQ ID NO: 12999 - protein, 245 aa, Artificial Sequence; identical to SEQ ID NO: 12998
  Synthetic

SEQ ID NO: 13000 - protein, 242 aa, Artificial Sequence
  Synthetic
SDAEVIEELVRLHRKLLEDILKLLKELVDIHRETLRRIEEIVERIVRLIEALLDKIRKEGKVDEAADEVDRRLKRLAEEIERLVRETERIIREVLKELERTLRETEKRIEDVKKELEERGTDEKLRRLLEMLRKLHEEVAEVVRRVVKLLLDNHKEVIDRVREVLEKLRTVLKELVDVASDSRKEALERLLERLKEIVDRIKEELDRLLKRSEDSIREIEERVKRLLEESKRVVDEIRERLK

SEQ ID NO: 13001 - protein, 242 aa, Artificial Sequence; identical to SEQ ID NO: 13000
  Synthetic

SEQ ID NO: 13002 - protein, 236 aa, Artificial Sequence
  Synthetic
SKEKKILDRLRELLKESRDLNRRVKETLKKLLEDSKRLLDEIRKRLKELLDELEKENKVPEELIRTVREALERLLRRLERHTDELRKALEDLLRRLEEHNDELEDALREILDVKRRRDEDERELRRKIEELKRRSDKLRRELKEEIKRLRDRSRKVKEEIERELKKLKEEIDRVLRETRNDEAVKRLKEVLDEVAELVKTLLEVNRKILEDVDKLIEEVLKLNDDILREVVKLAED

SEQ ID NO: 13003 - protein, 236 aa, Artificial Sequence; identical to SEQ ID NO: 13002
  Synthetic

SEQ ID NO: 13004 - protein, 243 aa, Artificial Sequence
  Synthetic
SEKEKLLEDIADIARKILKLLKEHLDKLRKLLEEIRRLLEEHSRVLRELIERILDALRRKKKLPEEELKRVAERLKELLDRSERRLREITERLKRLLEESERSLEEIKRRIEKLLDDLRKLSKRVDEDELLERLLEVLKRVVDLVREHNELNERILEEVLKLVEELLRFNEEVLKEIADLVRRVVGQDKDLERELKRVKEISRKLEEELKELKERVKRDSEKMNEDLDRLLEDAERRIRKTRE

SEQ ID NO: 13005 - protein, 243 aa, Artificial Sequence; identical to SEQ ID NO: 13004
  Synthetic

SEQ ID NO: 13006 - protein, 237 aa, Artificial Sequence
  Synthetic
SEEDKVLEELKRLLEELLRKHEEVLKEIKELLDKIIKKHEESLRRIKKLAEEIKERAKKPTSDEVLEEIERRLRREEEENEKILRELRREIEEARRRSEEILRRLRDKLRRLEERVRDDELLRRAAEIVDRVLKVHDKVIDDLKKILETILKIHKEVVERLSDIIRELLELIKEGRDGKTLTEELKRIEDKLEELIRRSKDELDKIVREAEKIIEESKRRLEKLLRELERIIEDAKR

SEQ ID NO: 13007 - protein, 237 aa, Artificial Sequence; identical to SEQ ID NO: 13006
  Synthetic

SEQ ID NO: 13008 - protein, 243 aa, Artificial Sequence
  Synthetic
SELEELVKRIEKTLRDLRRKNEELRKEVEEVEREDRERLERAAEDLERVEKKVEDEVRRRRDKSVVDKIIKDLRELLKKLLDIHADLSRKNLELLERLLRISKESVRELERLLRELLEEIRKAGRISEEELKRLKEEIETLSKRIEDIHRRLETELERLRKENREILERLKEELRRLDEEESRRRPIEKTIEDARRLLEKILKLHRENSEESRRLIEDINRVNRELIDEVAELAKKILRRVEE

SEQ ID NO: 13009 - protein, 243 aa, Artificial Sequence; identical to SEQ ID NO: 13008
  Synthetic

SEQ ID NO: 13010 - protein, 239 aa, Artificial Sequence
  Synthetic
RDEELLERVERLLRELLDTNRRKLEEVEKELRRLLETNKKTLDDVRRLLKELLDVLETREVKDEKRLRDIRRRLEEVVRRLDKLHRDIAEDLKRVKERLDRLHERIKRRLEEVVKELRDLKDRGVDERKVLERAAEVLRELLELLRESLEEIERIIRRLLELHKRSTEEAARALEELLRALEESDDLRELKKRIEDLLKEDKERLEKIARDIERDLERYRRDLKRLEDELREDIERARR

SEQ ID NO: 13011 - protein, 239 aa, Artificial Sequence; identical to SEQ ID NO: 13010
  Synthetic

SEQ ID NO: 13012 - protein, 244 aa, Artificial Sequence
  Synthetic
REEEVLRRLREIIKRLLDKNRKVNEDLVRLIKRVLDKNREVLKRLRDLIRELLEVVRNKRDDKDVEETVRRLERELEKLERTSEELVKKVKKELKDLLKDSRDVLEEVRKTLDTIVKETQEDEIVKKAKDIAKKLSDAHKKVLDDVRRILEKLVKLHRETLKKIRELLEELVRVVKAVRREKRPDEDLERALKKVKDELERIVRENEDADRKIKEEVDRLSEENEKVNREIKKELDDVVEETKK

SEQ ID NO: 13013 - protein, 244 aa, Artificial Sequence; identical to SEQ ID NO: 13012
  Synthetic

SEQ ID NO: 13014 - protein, 238 aa, Artificial Sequence
  Synthetic
EEDERLTKRVEEIKRENRELLRRLEEEVKELERKSEKIVRDLKEKVDRAKEKLDSNKESTELLVEELEKLIREILKLSEDHNRTLEEVVRKIEDVLRRNLERLKELVDEILKALKERKKRDVEELKRKVEKVARDYERLLRKLREVVKRILDESKRLDEELEERLKEVLKKLEELIKEGRPDKDVLTELKRILDELLKLVEKLIRRNLRLLEELLRLVREILRTSNEILEEILKDARR

SEQ ID NO: 13015 - protein, 238 aa, Artificial Sequence; identical to SEQ ID NO: 13014
  Synthetic

SEQ ID NO: 13016 - protein, 245 aa, Artificial Sequence
  Synthetic
SELDTLVELIKRILEEITRVNKELVDEVRKLLEEIVRINERSVRTIEKILRDIAELIRRGREDDRVKEDVKRRIEELKREHEEVEKKIREAIRRLEEESKRLEEDVRRMIKRLREEVERRRADEKVRRLLEELRRLLEELLELHKRLLELIREILERVLEVDKRSLDRLTEILERVLRMSDAGRPEEELEKELRRLKKELEEVVRKSREDLERLKKELEKIVKESEDELKKVEEKVKKLADDARR

SEQ ID NO: 13017 - protein, 245 aa, Artificial Sequence; identical to SEQ ID NO: 13016
  Synthetic

SEQ ID NO: 13018 - protein, 245 aa, Artificial Sequence
  Synthetic
TEEEVLRKVEKLIKDLLDVLRDLLRASEEVVREALRVLEELIEENKRVIEELSRALSDERRESVERMLRKNEERLKKILEDADRVLDKWRRLLEELSKKAKRVLDEVRKRLEEIKREVPETEKLRTLLTILEEILRRLEKIIRDILRINERLLEKLKRILERLRETNREIDERIRKLVEERRGAEERKLRRDLTETKKELEKRHEDLRRELEKLLRDYKRELEEIERRLEEIEKTLKRRADETRR

SEQ ID NO: 13019 - protein, 245 aa, Artificial Sequence; identical to SEQ ID NO: 13018
  Synthetic

SEQ ID NO: 13020 - protein, 238 aa, Artificial Sequence
  Synthetic
SDLERLEKEIRDLLDELRRLTEELEKRSRDILKRLKEILEELKRRIERLLDELRRRRGDTEVLKEVARVLETVLKLLEDVVRELEKLNKELLEANRRLLEEVERIVREVLRVLKEGRDKEELRRVLEKLREDIREVDERIKKINREYRKRVEEIREKLREAIRRAEELIRRIVEKIGSEDDSVRELIEVLKKALEDVRRVLRAIEEIVRRSVELNEKHSRELRRVLKELLELVAKAAE

SEQ ID NO: 13021 - protein, 238 aa, Artificial Sequence; identical to SEQ ID NO: 13020
  Synthetic

SEQ ID NO: 13022 - protein, 231 aa, Artificial Sequence
  Synthetic
SEEEELRKLAKKIEEVIKTSRDKLDKSRKELEKVIRDIERRLRELRRELEELVRRGLDEESLREILKRLIREVEEIARTLEELADDSLRKNKENIDEIKRLVEEILKKLEDNNVSEEVLEDVKRRIEELEKEAEEIHRRYKTELDKIKKKIRDILEELKKEVKRIDDEIKAGRDREDVLREIEKLLEEILRALRKLLKDLLDLHDEVLKADEKLLKRLREIVKKVLEEVRK

SEQ ID NO: 13023 - protein, 231 aa, Artificial Sequence; identical to SEQ ID NO: 13022
  Synthetic

SEQ ID NO: 13024 - protein, 231 aa, Artificial Sequence
  Synthetic
SEEEKLRELRKRLEDTVRRSKEELEKSTEELKDVIKKSEEKLEELKRRLEEMKRRGISEEAIKEIIRRLLESNRRNLEELRKLLEESLRKNRENLEKIMRLLDEVIRTLEENRVREEVLKEIRDRLREIKERAKEIHKEYKEELERIKERADRIHKEVKEKIEEVERRIEAGTDSEKLLTDAARILDDVVRVDRELLRLVLELHKRLVRADEKLLTDIRELARRVLEETRK

SEQ ID NO: 13025 - protein, 231 aa, Artificial Sequence; identical to SEQ ID NO: 13024
  Synthetic

SEQ ID NO: 13026 - protein, 236 aa, Artificial Sequence
  Synthetic
DEDERLRELRDRVRRSEEEDERRNKRHEERVKELEDEDKERNERHRKRLKEITDRLKERNTDDRVREILDELKRVAEEVNEVNERATKELSDLLKTLNDVNREASKLNVEAIERLLKLVKDGSPREEIEKRYRDIVKEIEERYEELLRRAKKILEDIKRKYDRLLERLEKIIDELRKNDIREDLLKVVRDSLEILKELIRTVLKAIEESLRILEELIERLKRHIETILRLAAETTT

SEQ ID NO: 13027 - protein, 236 aa, Artificial Sequence; identical to SEQ ID NO: 13026
  Synthetic

SEQ ID NO: 13028 - protein, 237 aa, Artificial Sequence
  Synthetic
DEEELEKEIKKLLEEATKKHEDVKREIKERLEKLRRDHEEAEKRVRDELRRLEEELERRNSDERTREAVELLKEIVKEILELVKRHVEKNAEIVERAIRLLEKHHKENKEIIREIIELLKRVTDRDRIREELKRLLDESEDSVRRILEEVEKLIRESEESVERIRRRLEELLKRLKDRAPDAEDLIRVLKKLIEDLERLLTKNRRLLEEIVKILTKLLKDNRDLLRRILRKVEETAK

SEQ ID NO: 13029 - protein, 237 aa, Artificial Sequence; identical to SEQ ID NO: 13028
  Synthetic

SEQ ID NO: 13030 - protein, 239 aa, Artificial Sequence
  Synthetic
DEARRIKEIVDRAVEIWRRLVEEIKRIVKEVLDKWRKLIRELIELVRKALEDLRRTNGAKEDVLRKIEEEAKKIIRDVEDLLKKIADKYKRIIEELEELLRRLTEKYKEIKKELDKGVDKKDVVKRLEELNREVLETVRKVLEDLARLDEDVLRTIAEILKRIAELIKRVLEAVIRDKGKTDELKRLEDDVRKKLKDLEDKLRKLRKELEETHRRLAETIRRIAEELERLHRELKRESK

SEQ ID NO: 13031 - protein, 239 aa, Artificial Sequence; identical to SEQ ID NO: 13030
  Synthetic

SEQ ID NO: 13032 - protein, 239 aa, Artificial Sequence
  Synthetic
SKDERLRKVLEDVERLLREVLKKHRKVIDDLRELLKRVVEIHRRVLEEILKRLEEEGIDETVLKRLDDAIKESEDSIRRVEELLEDVLRRSEEKAKRAEEDIRRVIEKLDRLARAGVPIEELVKELERLIDKLLRILREINRELKELLDRVIEILRRNNERLVRLAEDVLRRLRETGRVSDEVVERIRRTLEEIERRLRKTDKDLEKDLRELKKDLDRTDEELKRKVEKLKRELKETSK

SEQ ID NO: 13033 - protein, 239 aa, Artificial Sequence; identical to SEQ ID NO: 13032
  Synthetic

SEQ ID NO: 13034 - protein, 236 aa, Artificial Sequence
  Synthetic
DEKDRLEEEVRKLLKEAEDELRRLKRENEKLNRELKETLKRVKEESERLLRKLREDVRKDGTREESIKEVADRSIKLLKELLRILEEVIERSERSLEEVIKMLEDLIRRLEEILRRAGLREESLTKLKKKLEDVLKELRDMAKRYRDELRKIKRELEEAEKRYRKKVDELRRELEKGKPLEEVLEELDRLNKEVLKAIEEAAKKLEDLNRRVLEVLEDILRKLKEIVDEALKVLRK

SEQ ID NO: 13035 - protein, 236 aa, Artificial Sequence; identical to SEQ ID NO: 13034
  Synthetic

SEQ ID NO: 13036 - protein, 240 aa, Artificial Sequence
  Synthetic
KEEELLERLREVLKTDLDLLRDLVRTLKEDLDKDARLLEELVERLKKLLDKIKRLLEEEGAVSKDDLKRIEDRLREIKKELEKLLKEYKERLDKIKKELDKLLREYEEALRKLTKEARDLMREGNLREEVLKRISDRNERLIEEMAKKLRDVLRDNKRLVREIVEKLRTVLEDILRLVEEIDIDERVKREIRKDLDKIRREIEKIVKESEESNERSLEKIDRILEESKRRNERLKRELDR

SEQ ID NO: 13037 - protein, 240 aa, Artificial Sequence; identical to SEQ ID NO: 13036
  Synthetic

SEQ ID NO: 13038 - protein, 234 aa, Artificial Sequence
  Synthetic
SKKETIRKLIEENKDIIRKLAEKLKRLLEESERIAEEALRLIKELLERIERALRRVAKDIDEELLKELEKELRRLEEELKEILDRVRDLHRRLKEEIRKILEESKKLNEELEDRLRKDEDVEKLLELLERVHATDVRLLRELLKLLKKVHEDVVRLLERLLELLKRVLDRIVEELDLRDKELEKLLEDLEREIRRLKKRLKELSDRLEEKIRKIKRELDDLSRRLREKIERTRK

SEQ ID NO: 13039 - protein, 234 aa, Artificial Sequence; identical to SEQ ID NO: 13038
  Synthetic

SEQ ID NO: 13040 - protein, 240 aa, Artificial Sequence
  Synthetic
DDEKRLKDRLREALKRNEELLDRLRRRVEEILDRNRKLLERVRRELERVLKELEDLIRRGAPLEDILRRLREVIKELLELARRILEHNLRLNEELLERVERILKHNLDVVKELLDLVKERKGDTEELKKLLKRLKDLHDEVRKRLEEIERELRKLHRDVREELKKIDRRLEDRLRKVEEENSEDETVLRELVEELERVVRRILELLKRLSDASKRVVEEILELLRRLSEKTAKAVDDTRT

SEQ ID NO: 13041 - protein, 240 aa, Artificial Sequence; identical to SEQ ID NO: 13040
  Synthetic

SEQ ID NO: 13042 - protein, 235 aa, Artificial Sequence
  Synthetic
DDERRLETLIRLSRELIERVRKLLRDIIRTSKELIEEVLETVKRILDKIEELAKEVNLPREVLEEIKDELERILKELEDAVRDIERKYERLLTELEKMVREIEKKYKDLLEELEKGLDTKTILEEIKRLHDEVVEAIRRALKALEEIHREVHELIKRILDKLLEVLKKVVKVLEESGLRDEKISRKVEELEKEIRRLIEELKKKNEEVEKKIREIMKELDERSERLRRELDRTRD

SEQ ID NO: 13043 - protein, 235 aa, Artificial Sequence; identical to SEQ ID NO: 13042
  Synthetic

SEQ ID NO: 13044 - protein, 242 aa, Artificial Sequence
  Synthetic
SKEDELRKELEEVVKRIEDALRKLKERSKRVAKRVKKLLDDLKKESEEVVESLREKLEKERVPERIVRTLEELIKTNRDTIDELEKVAKKLIKLHEDTLREIERLLRELIRLLREALEANVEDERFLRELEKRLKEVLDELERLLRESEDRLERVIKEIEDKLRESRRKLEEDIERVEREGTTESVRKLLEELRRLHERIIKIIEEILELLRRVHKEVAKDVRRLARELEELVRRLVETLRR

SEQ ID NO: 13045 - protein, 242 aa, Artificial Sequence; identical to SEQ ID NO: 13044
  Synthetic

SEQ ID NO: 13046 - protein, 240 aa, Artificial Sequence
  Synthetic
SAEEILDTVAELIKTHLKIVREVLKTVRDLNRRSLDLIRRILERMRRLVERLVRLIRNNGRERELRELLKEIEEDARRLMEELRRLHKEVEDTIRKLIEELRRLNERIKREIERLIKDLRDERVIEVLRRLLDKLRRHAEEVEKALRDNLRLNRELIKRLEEIIKETLKRLEELVREVERDGPVEKRLREVEEEVERRLDTVRRELEEVEKESDRLLEELEKKSEDFERDIRRLLKEAKT

SEQ ID NO: 13047 - protein, 240 aa, Artificial Sequence; identical to SEQ ID NO: 13046
  Synthetic

SEQ ID NO: 13048 - protein, 237 aa, Artificial Sequence
  Synthetic
SKREEIEKLLEDLKRDNKRVLDRLREVIKDNEDKNEKAVRDARELLERLKRELEEGNLDERLRDVVRRLLTELEEILKELEETLKRNNDEVRKLVDELRKTSRENLEKLRELVEKVREGTSDKTIRDAKRESEKKLEDIKKRIKEVEDKSRKTVEDIRRRIKEVDDKLRRTLEEVRRRDGDTEALKRLEEVAKELLKLIEEVLKENERSNREILRLIAELVKRNARVNEELLEIARR

SEQ ID NO: 13049 - protein, 237 aa, Artificial Sequence; identical to SEQ ID NO: 13048
  Synthetic

SEQ ID NO: 13050 - protein, 237 aa, Artificial Sequence
  Synthetic
EKDDRIREKVKEIERRNDKALDDIRRRVEEIKRENDEVLDRIRKELEDLKKEVEEVAKRTGRVDVLEDAKRALEELLRLIEEILRRSKEVLKRLLELIERALRESKRVLRELIKVIERRRDDKDLEDILRRHEEIVRKIVRELEKILKEHRDIVKKVVEELRKILEDLERRIREKGVDEELKKLLDKLLEDLRRIVKKLEELLKKNDDELRKIVKEVKDLLKRNHDELERIVREARR

SEQ ID NO: 13051 - protein, 237 aa, Artificial Sequence; identical to SEQ ID NO: 13050
  Synthetic

SEQ ID NO: 13052 - protein, 237 aa, Artificial Sequence
  Synthetic
SKEEKIERDVDEIRKENEEVLRRIRKKVRDIERENDEILRKIEEDLRRIEKDLERVAKERGRRDVLERLRELARELLELIRKVLEDSKKMLRDVIKLIEEILRLSIRVLDELLEVIRRKEDEDRLRKILEDHEREIRRVARELDRLLREHREIVKEAARRMEELLERIKKDIDERGVDEDLRELLRKVLESLRRIVERVDRTLKDNDRKIEEIVRELKELLKKNNDALRKIVEDAKR

SEQ ID NO: 13053 - protein, 237 aa, Artificial Sequence; identical to SEQ ID NO: 13052
  Synthetic

SEQ ID NO: 13054 - protein, 237 aa, Artificial Sequence
  Synthetic
SREEVFELLLDVLRKIVELIKDLAKKNIDVLKKLMELIDELVKINEKSLEDLLRLIREGRDERDIDRLIRENKKKNEEIVERLRRLLKELEERNRKILKEIEELIRELEKELRKKVRGEEVERLLEEIRRVLKELLEKLERESREVLRKAEEILRALERLSERVLKILRDLLDLRRRNERDEKELEDEARRLKKEYRDEVERLKKEIREIIERYKDALRKLEREIEDITRRLKERAD

SEQ ID NO: 13055 - protein, 237 aa, Artificial Sequence; identical to SEQ ID NO: 13054
  Synthetic

SEQ ID NO: 13056 - protein, 238 aa, Artificial Sequence
  Synthetic
SKLEDLLRRAEELLKDIVRANERLLEEIRKLLKEIVKANEDLLRKVKRLLEEAVEMAIRERGDKGEELDKIKEDLKRVIEKSRRDARRIEEKLKEVIRESRERLKALREELKRVEEMVRRGELDEDTVLRELEKIIRKLLRVHEDSLEKLIRLIEELNEVDKESLRTLVKLIERLERDIKLREEIVTRVRKKVEELKEEVKRINDEVRKKVRDLEETSKRILERVEDLVRELKERARR

SEQ ID NO: 13057 - protein, 238 aa, Artificial Sequence; identical to SEQ ID NO: 13056
  Synthetic

SEQ ID NO: 13058 - protein, 238 aa, Artificial Sequence
  Synthetic
SKEDKARELEKRLRDNLKKLEEVVRELAEVLKRNLEKLRRLAEELLRALKRLLDKLRAGGLPKDELEDLRREVEDVLRRLKDLLRKLKKANDESLTRLEELLRRAEEENRRVLTTLRELLRNNGDDRDLARLVARLVEANNRALEELLRLVAKNVEDNNRVLEELLRLVKELAKRLLARIRDEDLVRDIRRELKELEERARKILRDDERDLRALEKRIRDIIREDREELERLKERARK

SEQ ID NO: 13059 - protein, 238 aa, Artificial Sequence; identical to SEQ ID NO: 13058
  Synthetic

SEQ ID NO: 13060 - protein, 243 aa, Artificial Sequence
  Synthetic
KREDILKKLEDIIRDIIDKLRRILEKVKRLNEDIIREIKRLLDESLKTLEDLLKRIADKSRDRELEDILRRVLEKLRRSLDKLRDTLRKLKEETDTVLERAERTLKELKDRLEKLLRDAEKVSEEDLVEMLKRLIDELRKVLEDVIRVSKELVERLLRALREHLETNKRLVKELLDALRKTTGDDEEIKRLKEELERRHRRLEEEVERVARELEKRHRDLERDIRRVAEELKKLLKKLRDDRR

SEQ ID NO: 13061 - protein, 243 aa, Artificial Sequence; identical to SEQ ID NO: 13060
  Synthetic

SEQ ID NO: 13062 - protein, 228 aa, Artificial Sequence
  Synthetic
REKEELSEEIRRRLDELRKLLEEYEEEVKRLLTRLRDKLRRYKEEVERLLRKLKEDNKVDEEVLKLLEDLLKTNLDILEEILRLLEEIIRRNLDILRRLLKLLEELIKEVEKRGGGTEEVKRRAEDVKRKIEELDRRSDEEIKRLEKRIRELNTDSKRRAEEVLRRIEKKGVPKEAVDLVRDVLRRVEKVNRELLELIKEVADRVRERNKELVELIDRLLERLKRADK

SEQ ID NO: 13063 - protein, 228 aa, Artificial Sequence; identical to SEQ ID NO: 13062
  Synthetic

SEQ ID NO: 13064 - protein, 236 aa, Artificial Sequence
  Synthetic
SEEETVERLLEEARKRHEEIIKKAKELLDRAREEHERIIREAEKLLEEIKKRVDELVRDGQPAEEVLRDLERVVEEILEVLRRLLDANRRVVDDVLRVLEELLRVNEEVNRRIIETIRLPEEVVEELKEENKRLRDRLDKLVKDLKKTNKEIEDKLRKLAEELKEELERIADRIRKTGTDRKTLLREIEKLLKTLEDILRDLLRLVEKTLKELEEILKDLVDKARENLKRLRERIR

SEQ ID NO: 13065 - protein, 236 aa, Artificial Sequence; identical to SEQ ID NO: 13064
  Synthetic

SEQ ID NO: 13066 - protein, 234 aa, Artificial Sequence
  Synthetic
SKEEEIVKEVEKIVEKLLEVNRRALERIEEIVRKNLKVNRELVEEIERIVEELIRTGDVDERVKRELRRRLEKVKEDSERVLKKLEEDLRRVKRRSEDTLRRLREELKRLKEELRDGDRSGDELEEALKKILKKSEEHVRELEEIVRRLLEKSREHLEELVRIAKRLLDEARKRKNVPEEMLRRVLKKIEEVIRRAREEHEKSTRELEEVIKELKKRHEDVTREAKKVIDDLKR

SEQ ID NO: 13067 - protein, 234 aa, Artificial Sequence; identical to SEQ ID NO: 13066
  Synthetic

SEQ ID NO: 13068 - protein, 239 aa, Artificial Sequence
  Synthetic
SEKEELKRLLDKLLKELKRLSDELKKTIDKILKILKEVSEEVKRTADELLDAIRRGGVDEEVLREIKREIEEIEKKLRKVNKEIEDEIREIKKKLDEVDDKITKEVEKIKKKLDDDRVDRKEVIKALKEILKEHADVFEDVLRRLKEIIKRHRDVVKEVLEELRKILEKVAEVLKRQGRREDELRKVEEDLKRLEDKLKKLLEDYEKKVRELEETLDDLLRKYEETLRRLEKELEEEER

SEQ ID NO: 13069 - protein, 239 aa, Artificial Sequence; identical to SEQ ID NO: 13068
  Synthetic

SEQ ID NO: 13070 - protein, 234 aa, Artificial Sequence
  Synthetic
SRVERLEKLLEEHKRLVEDLIRLLDELAKKHDEDVRRLIERLKELAERLKRLLERSGVEEELLKRVDEAIKRIEDKLRRLEEHIKRVIDDIRRRLEELREHSDRLIEEIRDRLRKRDDEEVLRTIIELLRRNMERVLRLIEEILKLLEENLEVVKRLLEDVLRILKRIAEEIESRLTDKRDVDRIREEIKKLIEDVRREIKRVEDKHKKDIDRVKEKLDRVRDRHEKMAEDSKR

SEQ ID NO: 13071 - protein, 234 aa, Artificial Sequence; identical to SEQ ID NO: 13070
  Synthetic

SEQ ID NO: 13072 - protein, 241 aa, Artificial Sequence
  Synthetic
REKEELLRLLKEIAERILDILRKALELLDRVVELDNRTSKELLELSAELVKRILEAVRDGKPEEEIRKTLERVKKESRKIVEKNKRLNEEVLKELEKLVDELRKLLEDIKRKLDELNVPDEVRKVLEDLARLLKEVIDLLRRLLEENSRVSEEIVKLNEEALKTLEELVKRLVDLERKGTSEEEKKRLLDDLRRILREYEERVKKLNDEHKKLEKEIKDKVKRILDEIRRTLDKILKELRK

SEQ ID NO: 13073 - protein, 241 aa, Artificial Sequence; identical to SEQ ID NO: 13072
  Synthetic

SEQ ID NO: 13074 - protein, 244 aa, Artificial Sequence
  Synthetic
KDEERLVKKIRDSLRKYEDLLRKLVERIRDLLRRYEEELRKLLTEIEKTLEDVRDVLRRKNVDERAKEVAKRLVEAVKRLIEIVKRILEKTKRVVKKLEDLLRRAAELNRDVVEKILEIIKRKGPEDDFRRIVRRLEELHREVEDAVRKLVEDLKRLHREVVEELADIIRKLDKLLKEVERDIDLGDLLEMLRRLVERLKRLIERVLKLNRELVKKLLELLEEALRRNRRLVEDILKIADEARK

SEQ ID NO: 13075 - protein, 244 aa, Artificial Sequence; identical to SEQ ID NO: 13074
  Synthetic

SEQ ID NO: 13076 - protein, 236 aa, Artificial Sequence
  Synthetic
SDEDRKRKKLEDVERRLEKLLREYEEKVRRVLEELRRLLEENKRHVEELEKRLRDRAKKPNDDEVLERAVREVRKHLKDNVETDRKLLEDLKRALEESVRLVEEVLKILKELIDELKSKVPGEEAEKLEDDLRRVVETVRRLLEESKRKLEKVIREVEELNRELKELVDRVADEIRRKRLLEEALERLRRLLEELLRINERIIELIRELLEDNRRILEEILKLIKDLLRRAERIVD

SEQ ID NO: 13077 - protein, 236 aa, Artificial Sequence; identical to SEQ ID NO: 13076
  Synthetic

SEQ ID NO: 13078 - protein, 242 aa, Artificial Sequence
  Synthetic
SEEEDLEREKRRLDKYSEDDRRRAEKVLRELEEEVKKSRKRLEDAKRRLDEEVRRNEKLEEEVLRLLKELVKKVTEIHERSLDLLRRAAEKVIRINERSHRELKRIVEEVIRIKRRNGSEEELDKLIRDLRKSLDDVRKTSEKLVKDILEELKRILDESKTLADKLRRDLEKIVEDIDRRNLPEEVLRILKTLVKELEDILRELLKINEDLVRRLERILRELLKSNDNLVKELEKLLEKARR

SEQ ID NO: 13079 - protein, 242 aa, Artificial Sequence; identical to SEQ ID NO: 13078
  Synthetic

SEQ ID NO: 13080 - protein, 246 aa, Artificial Sequence
  Synthetic
EKKERIREALERAVRTLEKLLEDDKRELDKARREVRELLRRDKEELDKVVERVERELDRARERLDEDIERMVREVLELLKKHLDEVRRAVDTVLRLLKTHLDIIREIIKRLIDKIRDLLRLVARDGTREKDLKKVEDEVRELVEKLRRDSEKVEEDLRRTAKRVRDLNEEVRRRLDKKRKDVERKPTPRKLEEILRLLEEALRRNSETLEEILRKLEEILKRNRKTLEDLLKLVKEILDEIRERLR

SEQ ID NO: 13081 - protein, 246 aa, Artificial Sequence; identical to SEQ ID NO: 13080
  Synthetic

SEQ ID NO: 13082 - protein, 247 aa, Artificial Sequence
  Synthetic
SLTERVLDLARDLIRILLEIHKRALKLIAELVKKLLKIHEDVLKLSEELVEELLEIVARRLPREDLLRALKELLEKIEDVVRDIERRHRDLLREAEEVVEKLKREHEEVKERIERAVKKLAEDGVDKDKLKELVDVLEEILRLSKTTLEELVKALRDVIRKSLEALKENLRILRKIIRELEELERVDEDTLRRVLERIREEVERVKEKHRRLLEELKKLLEELRKRSKDLLEDIKRKVRELEEKTRR

SEQ ID NO: 13083 - protein, 247 aa, Artificial Sequence; identical to SEQ ID NO: 13082
  Synthetic

SEQ ID NO: 13084 - protein, 237 aa, Artificial Sequence
  Synthetic
REDEELTKRVEKILRDAERLVRKLHRENREILKTLKRLVEELEKENRKVLKDAEDLVRKERESKEKLLKLAEDLVKRNEEALRELVRLAEELVKRNVRVLEELLKLLTDLLRELKDALRRAGRRREDLDRRIDEARKRIRRELEELRKRHEELLRELKKRVKELADEHRELLDRLRKRDEDARELLKELKRIVKKSLDELRKLLKKLEDIVRESNERLKEVLKKITDLIRKVLEDIR

SEQ ID NO: 13085 - protein, 237 aa, Artificial Sequence; identical to SEQ ID NO: 13084
  Synthetic

SEQ ID NO: 13086 - protein, 235 aa, Artificial Sequence
  Synthetic
SEEDKIAEELKETLKRYRDRLEEIRKELEDKLREYEKRLEDLARELEKKLRKLEARDVNVRELLKVLRDVVRAIEKLLRENLKVVEDVLRAVRRILEENLKVVEEILRRVLKILREVKDEERARREIEKIVRKLEEVDKKIEEDVRELKRRLEEANKKLREDLKELKRELERVLRDRNVDEDVRRVVRELLRKLEDILRESEETNKETLEKIDEILKESERTNREVIRKLKETTD

SEQ ID NO: 13087 - protein, 235 aa, Artificial Sequence; identical to SEQ ID NO: 13086
  Synthetic

SEQ ID NO: 13088 - protein, 244 aa, Artificial Sequence
  Synthetic
SAEETLRRITEESKRVLEEITKKYEDLERESREVLRKLREDLDRIKRELEDVLTKGKDDKDEVLTVLEKVLDELLKLHRENLRVIKELLRKVLEVDRENLEVLKRLLEKARDLLRRSGRDEKDLKKLEDELRKVKEELEKKHEKSKRDIEDLERELDKVTEEVERLLRKLKEELRRAAENSDEDRERLARLLKKLADKLIRVLEEILKINEELNRKIIKFARENLERNRRVNKKVIEVLREAAR

SEQ ID NO: 13089 - protein, 244 aa, Artificial Sequence; identical to SEQ ID NO: 13088
  Synthetic

SEQ ID NO: 13090 - protein, 238 aa, Artificial Sequence
  Synthetic
SEDEKLKKEVDDVLERAKRLLDRLREANEDVLRKAKEDLDRLLKSNREILEELRKIKGLDEIEKIVRELLRENHEVLKRLVKLVKELLDLNLKALKDLMKLVEELIERLKRALRKKVPEEKLRKLDEEVRRIEEKLKKALEESKRIVDEIRRRLKEIEDKSRKIARDIEKELKDTKRAGPLEERVLERLLKALKEHSDELKKVVEELLKLLEEHLREVEKLVRELLADLKRLLDKTRK

SEQ ID NO: 13091 - protein, 238 aa, Artificial Sequence; identical to SEQ ID NO: 13090
  Synthetic

SEQ ID NO: 13092 - protein, 246 aa, Artificial Sequence
  Synthetic
SKIEELLTKLAELLKEVIDELRKNLKRLEETVDENLKTMEDLLRKLEEVVREVLDIATKKNPSEEAKRKIDALRKKVEDLVKRIKDILEKDKRDLEKVVRDSEELLRELERKVREVLEEVKKIVRDVKDKDELVKRILDLLKELLDDVKRVIKEHLRLVREVLERNKRSLDELVKIIRELLKAIKEVGLVDDEVRKRLDERAERLEKEVEEVKKENDERAKRSAEEVKKLLDKLDEALRRLEEEVR

SEQ ID NO: 13093 - protein, 246 aa, Artificial Sequence; identical to SEQ ID NO: 13092
  Synthetic

SEQ ID NO: 13094 - protein, 240 aa, Artificial Sequence
  Synthetic
SEDDELIKKIKKLAEEIIDEIRKLIEKSKEILKRLLDELRKLIEKSKKLLKETLDKLRKDKREAREDLERVETVIKRAAEEHDRLLKEIDDALKRLEEEHEKLLTDVREVLKEVKKELDELKDKNADRTELLDVLRKALEEAKKVLERLLKLNREAIETLERVLRKLLKLHRDVLARIEEDGLDEEALKELEKKTRDLEDEIRKVKDDVKRRHDELKEEIERVLDELRKVLKRLEDEARK

SEQ ID NO: 13095 - protein, 240 aa, Artificial Sequence; identical to SEQ ID NO: 13094
  Synthetic

SEQ ID NO: 13096 - protein, 250 aa, Artificial Sequence
  Synthetic
KTEEILKRVKEILDELAKELRDIIRESLRTIEELLDELRRILEESERTLEELVKTIKDEVKDKEELLRRLKRLLEDLRRKHEELLKRLKEAVDEHRDRLRKILEELERVLKELRKRIEELRRSLDRIREKDVLRKLEEVLRKALEILERLLKKIRESARELLKIIEEVLDRNIKVMEEALKTIKELLKDGPDEVKRRLEEKERRIRTRYEELRRRLRKRVKDYEDKLREIEKKVRRDAERIEEELERAKK

SEQ ID NO: 13097 - protein, 250 aa, Artificial Sequence; identical to SEQ ID NO: 13096
  Synthetic

SEQ ID NO: 13098 - protein, 239 aa, Artificial Sequence
  Synthetic
EELEDVLRRIEEVLREIIRLLEEHHDMVRRAVERIKRLLEDHHKKVEDILREIKRRIDKEDVKRTLDDILRRNNETLKRLKEELDRLLKENEDRLRKVTKDLKRLLDKAKELVDRIDSEEVLRRLAEIVERILRTVRKVLRDSIRILERLLRVAREALERSIKSLREILDTVEKALKDGPEKVKKELKDLARKAEKLSEDVRRELEETVKDLRRKSKEVEDRLDKLTEEIRRTLEEKRR

SEQ ID NO: 13099 - protein, 239 aa, Artificial Sequence; identical to SEQ ID NO: 13098
  Synthetic

SEQ ID NO: 13100 - protein, 231 aa, Artificial Sequence
  Synthetic
KDEERLTKTAKESLDHNKELLDRIRKKSKEVLDHNKELLDRIREEIKRLLEELDRLKRENRPKERIVEILRKILRTLEELLKRLIESLEENLRVLAKLLEDLIRSLRRNVELIAKDLEEDDELKKLEKEYREIERELRERLKTLEKEYRDLIKKLRESLEKLKRELEKLERDGVEVEEVIKEVKKMLERALEELREVNDRDRRANERALRILEALNEEDKRATKRVLERKK

SEQ ID NO: 13101 - protein, 231 aa, Artificial Sequence; identical to SEQ ID NO: 13100
  Synthetic

SEQ ID NO: 13102 - protein, 247 aa, Artificial Sequence
  Synthetic
REKEELLKLIKRVIELLKRVLEEHLRLVEDVIRRLKELLDSNEKIVREVIEDLKRLLDEVRDDKRRLDRIKEKLEEVLERYKRRLEEIKRDLERMLEDYKRELKRIEEDLRRVLEEVERIATRNEKPMEFLIDKLRKILERALRELDKLSKKLDELLKKVLEELEKSNREIDKLLKDVLRRVEEAGAEEDLLRKAKKVITEVREKLKRNLEDVRRVIEDVKRKSRRILEEARRLIEEVERELEKIRK

SEQ ID NO: 13103 - protein, 247 aa, Artificial Sequence; identical to SEQ ID NO: 13102
  Synthetic

SEQ ID NO: 13104 - protein, 243 aa, Artificial Sequence
  Synthetic
SKVERILRLIEELLRLLREALRKIHRINEELIRTLEEVLREIHRINEDLNRKLREATGRNDDLDRADTESEKLNRDLRRRNEEVLKRLRESNKRLKEENDRVDKKIKKLLEDLERIVKDRPEALEELVKILEEIIRDIERLLRKNREVHEENIRLIEELLKENIEAHERDLKLIEDLIRRENLPEELKDRVREELDRSRKKLRKLEEEMRRKLKRSREELKKLEEDLRRELKKLREELERIRR

SEQ ID NO: 13105 - protein, 243 aa, Artificial Sequence; identical to SEQ ID NO: 13104
  Synthetic

SEQ ID NO: 13106 - protein, 236 aa, Artificial Sequence
  Synthetic
SRKERIKRALEEHIRKLKEITDEVRKTNEELLELTRRILEEAKKANEELVKKIREALDKVKELEEEIRKLIEESERIVEELEERSKELLKRSREEVEEWRRRSEELLRRLEKILRDVKDEKELVERAVKILRDDSRIAKEILRRNLRLIEENLERLKEIIERNLDLLRRLLELLKRAGVDEEALKELEEKLDRYRRKLEDLLRKYAKKLEDYKRKVKKLEEENEELLKRIEKEMEK

SEQ ID NO: 13107 - protein, 236 aa, Artificial Sequence; identical to SEQ ID NO: 13106
  Synthetic

SEQ ID NO: 13108 - protein, 226 aa, Artificial Sequence
  Synthetic
SEKEELEKRLRKKLEEIKELVERYKRRLEELLRRHREELKEIEKRLEDLERKIEELDVPERVKKLLRDLIRVLREWLRRSHDLLRRLLEVSKKALEDILRLLEKLLKEIKDLEDEDRLEERIDKVLKDLKRIDDRVREMVKEVLERDDRLARDVKKKVEEVLRELEEAGVSEEVKKIIEELLRLAEEVLRRNKRLIEALLELHEDEFRKVEEIIKELSEEAKRASK

SEQ ID NO: 13109 - protein, 226 aa, Artificial Sequence; identical to SEQ ID NO: 13108
  Synthetic

SEQ ID NO: 13110 - protein, 238 aa, Artificial Sequence
  Synthetic
REKEKIREALETNLRLLEELIKRLKEILDTHNELLRRVIETLERLLKELLELLEEAGLEEEVLREVKRLVDELRKEARRVLDEHEKLVRKIKKEAEDVKRESEEIIKEVEDKLEKLDREELLERVRRVLKKSDDLIAELVRRALKILEELTRLLAELLKKVVEILRRIVELVERVLTKKGAPKEDLERLRRKVEELEDRLRRLLEKLKRDSDELMRELERILDRYRRESEELDRRLAE

SEQ ID NO: 13111 - protein, 238 aa, Artificial Sequence; identical to SEQ ID NO: 13110
  Synthetic

SEQ ID NO: 13112 - protein, 232 aa, Artificial Sequence
  Synthetic
SELERLRKILDDLRKKVERVAEEHKRANDKLAEEIRRVLKTHREMNERAIEEVKRTVGDDERIREVLKKVLKESEELLREVEELLRRILERSKDLLRELKEILDRVLREVEELLKRNTDSREALKLLEKLLRMLLEVSKRDNRLLEELLKLLRDISKRDHEVLKKLLDEIRRTNTDLREVDKRLRELLEEHKKLVDDLDKRARKVHKEHKDKVDKLREELEKTLRDIKRETD

SEQ ID NO: 13113 - protein, 232 aa, Artificial Sequence; identical to SEQ ID NO: 13112
  Synthetic

SEQ ID NO: 13114 - protein, 246 aa, Artificial Sequence
  Synthetic
DSDEIVKTLLEKLRRILKEVEEIARENHKRDRDANREINKLVEDIARRLEEVAERLREVIDERVLKKLKELLDRLREDLKRVDTENEELARRDEKRLEDVIKKIEELLRDLEKKLEEVKRRGEPREDLLRKALEVLKRIVELIDKLIKDHEKSLRDSVELNLRLLRRILEVVERVVELLERVLQGLDEKDLRRLRKDIERLKEEVKRALDELRKKYKKIEDDNRRLVERIRRELKKILDELDEKRQ

SEQ ID NO: 13115 - protein, 246 aa, Artificial Sequence; identical to SEQ ID NO: 13114
  Synthetic

SEQ ID NO: 13116 - protein, 241 aa, Artificial Sequence
  Synthetic
SEIEKVLEINRRVLKELERIVKKVLDIDKEAAELLRDIIRRVLEIIKKVIDDIIRTRGEQEDVRRVEDELRRTIKKLKELLDEYEEETRKLEEDLRRELEEVKKRSEEVEERAKSGRDKRDIDDLIRELHRLDRELVKRLRDRIDEVVRRNEELVKRLEDEIRRLERDLERLLREVLRRTKDKDLEEKLRRVLEELKRLVDDLRRLIDEIKKRYERMVEELKKEIERVLRENEEAVKDLER

SEQ ID NO: 13117 - protein, 241 aa, Artificial Sequence; identical to SEQ ID NO: 13116
  Synthetic

SEQ ID NO: 13118 - protein, 243 aa, Artificial Sequence
  Synthetic
SEEEELEKIAREVLRELKEILEELDDIYRRVTDRLRKLLERLKKEYEEVKKELEDLKRRKADVKDLLRVLRRLVKVDMEVLDKLLEIVRELSEADKDILRRILEVVEKAVKALKDVLDRAGEPERDVKKKKDDIDKKLEELRRELEDYKRRNDERLKRLEEKIEKYKRDSRKILEDIEREVKRDGPSEELVDRLIKLLDENLKRSEEVIREIIELARKNAEDSRRVIKKIIELLREMLKDARR

SEQ ID NO: 13119 - protein, 243 aa, Artificial Sequence; identical to SEQ ID NO: 13118
  Synthetic

SEQ ID NO: 13120 - protein, 249 aa, Artificial Sequence
  Synthetic
DSERELEKVLKDAKEKLDRSLEEVKKVTRETEKRIEEIDKEVKEVLEEADRRVKKIETDKERGDEERLARELTRVVRDIVRRLKDLARKLLEVVRRNAEMNHRINRKNNKVLRDIVRRLEEVMRRRGLDEKRVRELIERLRRLLKELEKEDRRINEEYKRVLREIERKVREVSKTLDKLLRELEERLKKEGLDERLIREIKRIIERVIEILKDIAKEILDLDRESVRLDTEVLKKLLDIIREVVKEAKK

SEQ ID NO: 13121 - protein, 249 aa, Artificial Sequence; identical to SEQ ID NO: 13120
  Synthetic

SEQ ID NO: 13122 - protein, 249 aa, Artificial Sequence
  Synthetic
DEEREVRKVLRRAEELLRRSLKKAEEVTRETRKRIKELLDELRKVLERAERELRRIRREKERGDEKKLADELEKVVREIVKRLEEILRKLLEVIRTNMRRNHEINRENLEIVREIVEELKRILEERGLPREDLERLVRKLEDLLRRNEKKDKDINRRYKELVDRLEELVKDITRRLRELLERLKKRIDETGLDDRLIEEIKRILEEIIKLIADLARRVLKIDEESVKLDEDNLREVLKILEDVVRDSER

SEQ ID NO: 13123 - protein, 249 aa, Artificial Sequence; identical to SEQ ID NO: 13122
  Synthetic

SEQ ID NO: 13124 - protein, 235 aa, Artificial Sequence
  Synthetic
SEEEEIKKDLERLIDKLRRTSKRLIDDYRRVLEELERTIKRLLEELEELIDELRRRGSLEEKILKVVEDLLRVLKKLLRELLELIERNLELIKRLNEELLRVVEKILKVLAERSTADEDLTRVLKELKEVLDDLVKKHRDSLEELKRVVKRLKDELEKVLRDAKRVLDELKRDGVSEKVERALERILELLKRVIEELERLAEEVLRLSKRVAEENKKLLEEILRILEEIIRRAKK

SEQ ID NO: 13125 - protein, 235 aa, Artificial Sequence; identical to SEQ ID NO: 13124
  Synthetic

SEQ ID NO: 13126 - protein, 248 aa, Artificial Sequence
  Synthetic
SKEEELEKLVRKVEEDLKRLEEESERIKKEIKDTLRKIRKRSEDLKRKVKELLRRLEEEARRVRLEEAIKIIKEILDELAKVNEDIIRIIKELLKRLVDTNRRVIETIDRILKKLVDDLRRANLPEDKLREVERELRELKKELEEIVRESEKMLKELEDKLREIVRESRELLEKLRRDLKRIKDGNLRVDEALEMLKRLLDKALKVHEDVLRKLVELVDEVLKVHEESLRKLLTLAKKVLEVLRKITK

SEQ ID NO: 13127 - protein, 248 aa, Artificial Sequence; identical to SEQ ID NO: 13126
  Synthetic

SEQ ID NO: 13128 - protein, 244 aa, Artificial Sequence
  Synthetic
DDERRKLEDLERMVEELKRKSDKLLKEIREEVERLERETRKLLEELKRKVDELREDLRRNPEDRVLRKLVKLLEDILDKVRKLLKENLDLLKRLLDIIEKLLRDNVRLLEELLRIVRELMKTKDEEKLTRKLEKALKEVRDAARETRERLKEAKKEVKTVADRNRKRLEELEEEVKRVLDEIRKEKGPSEDLEKAERLVKDILRLNEEHTKELEDVVRDLLRKLEKHTRDLEKLVKDALDKVKT

SEQ ID NO: 13129 - protein, 244 aa, Artificial Sequence; identical to SEQ ID NO: 13128
  Synthetic

SEQ ID NO: 13130 - protein, 246 aa, Artificial Sequence
  Synthetic
SEKEELLKRLEDVLRRIKERLDELRRRYKKALDELREESKRLIEKLDKVLREIEELIKRKDRDLKDIVEAIKRLNDEHLETLKEIVKKIMRIDEEVLKKLEDIAREIKEELDRILKTLADEGLPEKKLEDIARLVTEIKEELDRILEKIRKDSTDSNKELKDIIDEVRKLHERLKRELERLAREEKSEEILRLLLELLEESIRVAREVNRLLLRLLEKNKELVEEVLKRLLDLLKKIIDIVREVIT

SEQ ID NO: 13131 - protein, 246 aa, Artificial Sequence; identical to SEQ ID NO: 13130
  Synthetic

SEQ ID NO: 13132 - protein, 244 aa, Artificial Sequence
  Synthetic
SKIDEALKKLRKILEDAIKLNKELNDTTREILKEIIKLNREVLEKIRRILKELVDLILKDLKDDEEAKKELKKVLEEVRRRLEEIKKETDRIVKEVEELNERNDREVKRAAEEVRRLLEEIKRSDRDEKELIKKLKEIVDRIREAHRRSVEELSEVVKRILDALKDTLRKLEDVVRKLLELARRIAGDTEELRRVVEKVRKELEDDKERYKRLEEEVRRLLEEMKRRSEDLERKVEEILRRLTE

SEQ ID NO: 13133 - protein, 244 aa, Artificial Sequence; identical to SEQ ID NO: 13132
  Synthetic

SEQ ID NO: 13134 - protein, 237 aa, Artificial Sequence
  Synthetic
SEKELLEDLRRKAKEVKDRHEELLRDLERTLKKLKDEHDKKLKDLRDELRRVEKKLDDKERTEALERVKEVLRKLLKLVEDLVRRNKEVIDKLLELVRELIERNKKVLEELLKLVEDLSRKRSEDVERVIRELREILRKLHETNKRILDELRRLLEELERENRKILEEAKRLLEELEKKVDDKELLKEVKDLLRKLEKVVRDSLELLKRLLEDIEKRVRDSNRELKRILDDIEKKAK

SEQ ID NO: 13135 - protein, 237 aa, Artificial Sequence; identical to SEQ ID NO: 13134
  Synthetic

SEQ ID NO: 13136 - protein, 235 aa, Artificial Sequence
  Synthetic
DKEEELLKKLEEVLKKAEDLIRESNKALKELLDEAVKIVEDSLRELERTLRDIERKVDKDEVIRRLRELVRELTERNKEALTRLREEFKRLHDENKKILDDLRKLVDELRERVKKTKDSETIIRLISKVLDDLLRLLDELVKRNTEALKKLIKLLEDLVRENKRVLERLVELVKRATGETEDLRETEKDLRRLSEEHKRLLEELRDKARRLTERHEKALKEIEDELRKIKDEARR

SEQ ID NO: 13137 - protein, 235 aa, Artificial Sequence; identical to SEQ ID NO: 13136
  Synthetic

SEQ ID NO: 13138 - protein, 239 aa, Artificial Sequence
  Synthetic
DEEEKIREDLERTLREYERELRRAKEELKETLKRYEEELREVKEDLDRTLEEVDDLLRRGELEDREAIRILRELLKKLEEIIRRSKEVLDKLIKDLEDISRRSIEVLEELVKKVRKDGLPEEVLRRIKDLIRRLRERNKEILDRIRKLIEELVERNKRALDRLRKLIKELEERVRRTDDKKTLLRDLKEALKTLIKLIREILEDNLRVLRRIIELIETLLEDNRRVLEEIIKLIEEATT

SEQ ID NO: 13139 - protein, 239 aa, Artificial Sequence; identical to SEQ ID NO: 13138
  Synthetic

SEQ ID NO: 13140 - protein, 238 aa, Artificial Sequence
  Synthetic
STKEEVERIVEELRRAHEKSLRDVKKILDDLAKIHDDSLEDARRIIEKLDRILEEIKDRDKSREVVETLTRLLEEIEREIRELVRKNRELLRRITERLKELVRRNEDVDRRVREKVERVPISEELLKLIEELSRTNRRVLEALERLARELLKTNERVLEELKKLLDRLLELVKRITDDGVEDDKLLEDVKEEIRKVKERIEDLLRRSRELLERLRKRLDDLLADSERKIDEVTKRTRK

SEQ ID NO: 13141 - protein, 238 aa, Artificial Sequence; identical to SEQ ID NO: 13140
  Synthetic

SEQ ID NO: 13142 - protein, 244 aa, Artificial Sequence
  Synthetic
DELEKVERLLEEIEKIIEDLIRRVEELVRRILEFNKTTLKRNEELVRELEKLVEETTGRTEELKKIVEKLEKLHREVKKKSDDLVKRAEELLKEVKERLKEIVKTIREELRKVKESDRDRKELLKLLAEILDKLLKLLKRIIEELLRILKELIKASKESLDDLKRINEELLRDIEDLIRKKIKEKKEVVRKLEEDLRRVRERSKKLVREHEKFLEDLEETIKEEKRRVDEELKRIKEEIKETRR

SEQ ID NO: 13143 - protein, 244 aa, Artificial Sequence; identical to SEQ ID NO: 13142
  Synthetic

SEQ ID NO: 13144 - protein, 242 aa, Artificial Sequence
  Synthetic
SEKERLMRLLDKLKDLNRRLVERIKELLDKALELHKKLVKELRELLERLKELVERAGVPEELLTRIDELIKKLEDEARKISKEVKRLIDELKKRLEDIHREVDRLIRELKETLKRVTDKDELLRRVKEVLERIARLSEELIREVKEVLEKIVELSRELLKRVLDVLRRIAELLEDALRKENVEEETVRRLREALKKLEDDLRKIERDAEREYKKLKDELEELTERYRREIRKLKEELKKDRK

SEQ ID NO: 13145 - protein, 242 aa, Artificial Sequence; identical to SEQ ID NO: 13144
  Synthetic

SEQ ID NO: 13146 - protein, 243 aa, Artificial Sequence
  Synthetic
SKREELKELLERLLKLDRDTLEELKRLLDELKKTNDDTLEILKRLLEEVLRVIRETGLPEDILRRAEELIRRLKKKLEEIVRRNEELIRRLREDLKRIHDEIRKLIEDLKRDLDRTKDERTILKLVKEVLERISDLNRKILDSVRRAIEKDVKSNEEILDLVREALERLAKLVEDAVREKIREDKDRVREIERRLEELRKRLEKVERDLRDRHRKVKKKLDDVIEKVKRRHDELRKELEDAER

SEQ ID NO: 13147 - protein, 243 aa, Artificial Sequence; identical to SEQ ID NO: 13146
  Synthetic

SEQ ID NO: 13148 - protein, 250 aa, Artificial Sequence
  Synthetic
KDEEEVEKEIRRLLEKVKDVLRRSLEELERLLREIKEVLEKLEREDEENIERIKRELERQLPSEDLLRVVEELIRSNVTLSKRALDEVKRLIRRLVDVSRRALEKAIELIREAVELLERALKRKGLPREEVKRLRDEIKKIEDRLKELLRRYEEEVEKIERRLEELIRRYETEVERIERRLEELRRANLDRETLIREIEKILRRLNELNRRLLREVERILERLLELHKRLLDELLRIAERLMRLVEEVKK

SEQ ID NO: 13149 - protein, 250 aa, Artificial Sequence; identical to SEQ ID NO: 13148
  Synthetic

SEQ ID NO: 13150 - protein, 247 aa, Artificial Sequence
  Synthetic
SEAEDLEELIKELAELLKDVIRKLEKINRRLVKILEDIIRRLKEISKEAEEELRKDTVEDKDILRDLERRLREILEESDRLLEELKRRLEEILRKSKELLRRLEEVLREILKRAEEVKRSNLPKEELIKEIVKLLEELLRVIEKILEDNIRLLEELVEVIKEILEKHLRLLEELVRVIERILREVRKDKDEAERRRRELKDKLDRLREEHEEVKRRLEEELTRLRETHKKIEKELREALKRVRDRST

SEQ ID NO: 13151 - protein, 247 aa, Artificial Sequence; identical to SEQ ID NO: 13150
  Synthetic

SEQ ID NO: 13152 - protein, 242 aa, Artificial Sequence
  Synthetic
DEVEKLKKLLKELEELNREVVDTVKKLLDELVKLNRDVLREVRELLKKLIDALEKTGIDDTVRRRLEDIERELEKVLEDSERKLRRIKERLDEVVKESKERLERLREELDRLARSNLPREELLDAIARVLRKILKVHEDALRKIEKLLRDLLRIHRTSLREIERLLRELLEVIRDVLDKRNVDEELRRELKKLEEEIERALERIRRRSEETADRIRRTLEKLREKSERKRREIEDTLRKDRK

SEQ ID NO: 13153 - protein, 242 aa, Artificial Sequence; identical to SEQ ID NO: 13152
  Synthetic

SEQ ID NO: 13154 - protein, 249 aa, Artificial Sequence
  Synthetic
SLLEKVKKVIERLLEIHKKLLEELKRLIEKVLRITRENLEEVKRLIKRAVEILRRIAEEKDKDTVEKLIRDLERELEKVLDDSRRLAEELERELEKVLREWEEKSKRAMEELDEVIKRLIKEAGDRSEKLRIVEEIVKDLERADEDVIRKVKELLEEHLRLHRELNRLIKEVLDDLLRALRELAESRTREEEVTRKIEELRKKLTKLIRELEETLKEVKKRNEDALRRLEKESKDLAERVRRLIEELEK

SEQ ID NO: 13155 - protein, 249 aa, Artificial Sequence; identical to SEQ ID NO: 13154
  Synthetic

SEQ ID NO: 13156 - protein, 240 aa, Artificial Sequence
  Synthetic
SDKEEIKRRVEKTARDLETEHDKIKKRLEDTVRDIKRELDELLEKYERVLRKIEKTLREGDKDVTDLVDKLLETVKRLNEEVLRTVKKIADELRRLVEEVLRVLRESNETLARLLEEANVRDEVRERLEEVLRRTEEIIKTLEEIVKRLLDELRRLVEELRRISKKLKDELDKIKEKDKDEKRLIEEVVRLLRENLDVVRRILEALAKLIKELLEALEEVLRRNKELIRELLRVLDEALK

SEQ ID NO: 13157 - protein, 240 aa, Artificial Sequence; identical to SEQ ID NO: 13156
  Synthetic

SEQ ID NO: 13158 - protein, 248 aa, Artificial Sequence
  Synthetic
DEEERVKKLLTDLRRLLRKLHEESKKLLDELRKKLRELRRRSEEKLREVERRLREAEKKLPETRVLKLVADVVKKVLDAIRDLNRKLEEIIDEALKLLEELDDILRRVVEEALRLLKEIKDTKRDRKEVKKRVEDILKRLEELVKEYEDRVREIKKRLRRALEELRDEYRKIREDIERVLDELRKGGVPEELLRVLEELVRTLKKLLDENLKMVERLIRELEKVLDDHERKVRRLIEELLEVLDRDAK

SEQ ID NO: 13159 - protein, 248 aa, Artificial Sequence; identical to SEQ ID NO: 13158
  Synthetic

SEQ ID NO: 13160 - protein, 248 aa, Artificial Sequence
  Synthetic
DEDRIIEEIARLLEELLRELLELIKKLIETNRRLNEEHERAVRELARLLEELLDRLVKKVIEDEKLKRIRERLKRALDDLERLHREINKRLEDLVRELEKLVREILKELKDALEELRRASARAGGEEVLRRLEEIVKKLLDLVRRILERLKEIHKDNVRLLRELNERLTRIVEDLVRLIREILREAGVDEKIKKEIERELEELRRMIKRLHEDLERKLKESEDELREIERRLEEKIRRLEEKLERKRR

SEQ ID NO: 13161 - protein, 248 aa, Artificial Sequence; identical to SEQ ID NO: 13160
  Synthetic

SEQ ID NO: 13162 - protein, 251 aa, Artificial Sequence
  Synthetic
STEEKLRELVKRLEELLRDLERLLRELEKSNRDLNETALRLVEESDKLLEELLEKLARNNVVDEELLRRARKELKRLIEENKKIAKEINDRTEKLVRELRTLLDRLREELKRLIEELKKLLKDGLPDEDLLRDVKRAVEEVLKILRDLLTKVEELDKRNVDLLRKWLEVNRKIVEDVLRILEELLKRDAREDKDTVKRLKEDLDKARKDHEKKLEDLERLLKRNEERLRKMKKELEDKVERLRRELEKKRK

SEQ ID NO: 13163 - protein, 251 aa, Artificial Sequence; identical to SEQ ID NO: 13162
  Synthetic

SEQ ID NO: 13164 - protein, 251 aa, Artificial Sequence
  Synthetic
DEEEKIRTTLDLLRKLLKVLREILEELIRSNKELNERLLRLVEDSDRLLEELLKKLEDDNVVDEEALRRIKKRLEDLIRTNREIEERIDRESERLAEELRRILRELEKELRRLIEDLKEVLKRGLPREELLRRLKKVVEDVLRILEEVLRVVDELDKENVRLLREWLERNKEIVEEVIRILEDLIRKRAREEEEKVRDTEKKLRDLREKHKEIAKELERLLRENRRRLEELKREAKKVLDELRKRLEDERR

SEQ ID NO: 13165 - protein, 251 aa, Artificial Sequence; identical to SEQ ID NO: 13164
  Synthetic

SEQ ID NO: 13166 - protein, 240 aa, Artificial Sequence
  Synthetic
SEKEEVEKRLKDLEEESERLLKEVRDTLKRLEEESKKLIDELRRKLEELRKEVKELVDRGRDVKDLARELLRLLEELLRDLKRVADESARRNEELVKELKRLIDESLKANTDLAEEIKRTDNTDERKLRELERVLEEYRRRIERLKEELDRVLEKWKTEIKKIKKELDDVLRKAEEEVEKNKTVDKALTKVVDDVLRVLERVIERLLRLNKESLKELERILEDLRRLNKKTLDVLREVTR

SEQ ID NO: 13167 - protein, 240 aa, Artificial Sequence; identical to SEQ ID NO: 13166
  Synthetic

SEQ ID NO: 13168 - protein, 240 aa, Artificial Sequence
  Synthetic
KEKEEVEKKLKEAEEEHRRLNREVEEDLKRAKRESERLLEEMEKKLDELEERVERLLREGRDVDDLIRELLKRVRDLVRELKKLIDESAKLVRELVKRLKKLADDNLELVRRLVKEIIDRINTTEDIIRELKKVLEKYEKRVREIKKRLDEVLKKWEDEIRKIKEDLDRVTKKIEDDVRKNRNVREVLEKLVRDALRTLREVLDRLRRLNEELLEVLRRVLRELERLTRELLKVLRDALK

SEQ ID NO: 13169 - protein, 240 aa, Artificial Sequence; identical to SEQ ID NO: 13168
  Synthetic

SEQ ID NO: 13170 - protein, 250 aa, Artificial Sequence
  Synthetic
SEAEEVARRIKELVRELEKLLRDSEETIKRLIDKNRDLLRRIAETIDKLIKDLRDLLRRIKGEDLLEAIKRAIKTAIDVLDKLLKLDKTTLEELIRVLERNLEEIRRVVEELIEVLRELARRRRVSEEIKRRLEEKVKELRERLERARKRHKDAAKRLRDSARKLEEELRRLADELRKELEELERQGDVKDEDVRRALERVEKLLREILERLKRHSEELAELARRLLDENRRIIEEIIKLIEDILRELKR

SEQ ID NO: 13171 - protein, 250 aa, Artificial Sequence; identical to SEQ ID NO: 13170
  Synthetic

SEQ ID NO: 13172 - protein, 249 aa, Artificial Sequence
  Synthetic
DLERLVEELARLLKEALDTLARHSERLIKLAREILETLRRHSERIAELIERILRELMERRGRTEDIERVKKRVEDIIEKNKELLRRIKRRIEELAKKNRKLLDEIRRRLEELIKRLEELLREGRPEEEALRLLAEMVRRALEVLKELLRRDAETVEELLRVLKELLELNERTIRELETILDELVKRAGLPEELKKKLEDISREIKKSLEEVEERLRRISDDVRRSLEELKRILDEIEREIERRLREAKR

SEQ ID NO: 13173 - protein, 249 aa, Artificial Sequence; identical to SEQ ID NO: 13172
  Synthetic

SEQ ID NO: 13174 - protein, 246 aa, Artificial Sequence
  Synthetic
SDEERLRKEIRDRVEELRKRLDDTEEEYDKRIRDLRRKIKEVEDRYREKIKRLEEKLRRGELSTELLLEAIARTSEEVNRILEELLREIADLSREVLEKLRRLAKELEDLVEEILRKLLARRDTERIREIVRKLRELVDEVRKRLEDIIRENEELLKKAEEDLKRIVEENEKLIRDAADRIRKIKDKDTVLRILKELMDRDEEILRRILKLIKELLDESKKTVRRVLELLKELLRKILKLVEEITR

SEQ ID NO: 13175 - protein, 246 aa, Artificial Sequence; identical to SEQ ID NO: 13174
  Synthetic

SEQ ID NO: 13176 - protein, 237 aa, Artificial Sequence
  Synthetic
SKKEILKEVLRRILKLIRELIETIKKVLKRSLDLNKELIDINKEALDRILKLLTDIGLPEDVLEEIKRAVEKLKKRYEELLKKYKEDLERIKRRLEKLKEEIERKVKKLEELVDTISLEEVLERIDKLVEDVLRTVEEVLEELRKLNKESLDTSREMLRRIKELVKRVIEELERAGIDKRRLKKLADELKEILDRLREKNKEIADRAKELHDEVRERLKEIAKRLKDVLRDARERVR

SEQ ID NO: 13177 - protein, 237 aa, Artificial Sequence; identical to SEQ ID NO: 13176
  Synthetic

SEQ ID NO: 13178 - protein, 238 aa, Artificial Sequence
  Synthetic
REMEEVLKRNLDAARRVLETLKRILDRLKELNERSLRSLRDILRELLDIAREVLDLRRAGSSEELKRRTEEKIKKLVKEIDERLEDLLRRYEEEVKKIEETLERLLREYEKLLKKIREEMGDEDEKVKKILEVLERSKKIIKELLEALKKVAKDSLRLNRELVKVIKRVIEEIRRLIREQDDIEKVRKDVEDLAKELEDRLRDVERESRRLLEELRETLERALRRVKELHDELREAIK

SEQ ID NO: 13179 - protein, 238 aa, Artificial Sequence; identical to SEQ ID NO: 13178
  Synthetic

SEQ ID NO: 13180 - protein, 237 aa, Artificial Sequence
  Synthetic
SRKEELLRILRRILEIAEEIIRDLKKWLDDDRELVREILELIKRLNEDNNRLIREAGLREEVLKELEDRSEDLKRKLEKLREDYRRELKRIEDKLEELKERLRKVVEDLERLIEKMDDKEVLDELRRLIEEAVRALEEVLKEILELSKTVIERLKDLLEEDKKIVKKVFDMLRRDDKREDELRRLEEALKESKRLVEEVLKRIEDVLRESKKLADEIRKKIEDLVRELEEELERVAR

SEQ ID NO: 13181 - protein, 237 aa, Artificial Sequence; identical to SEQ ID NO: 13180
  Synthetic

SEQ ID NO: 13182 - protein, 244 aa, Artificial Sequence
  Synthetic
SKEEKKKELEKKAREIKRRLEENKREYKEKVDRLKEELRRLLEEIREKVKRLEERIRRAIDKEEVVRLLKTILEELLKILEEVLEEIDRLVDENAKAHKRLLDVLKKILEDLLRILEDVERRDKSRELEETVERRIKRLEEKIRKVEEEYRRVVETLKREYKKILDKLEKLAEELKRKIEEVRKRNVLKDLVKELEDVLKELLDLLREILKTVKRVNEDSVRSAEKLIEDLERMIRELLKEARK

SEQ ID NO: 13183 - protein, 244 aa, Artificial Sequence; identical to SEQ ID NO: 13182
  Synthetic

SEQ ID NO: 13184 - protein, 234 aa, Artificial Sequence
  Synthetic
DERERIEEDLKRLRDTLDTKEEESRRRIRELEEDLKRKIEESRRRIEKLKRRMEEDGAPGELVEILERAERANERNLKLIAAILDLIKKANEETLREIRRILDEIERVIRELERLDRREDEVRKRLRDILRKIREEIKKIERRNDKVLRDIKELIDRIKTHLKKVLDDVKRLLDEIEPSEILDRLRKVLEELARRDRKILEDLERAVRELDKLDRDILRTLLRVAEELLRRREK

SEQ ID NO: 13185 - protein, 234 aa, Artificial Sequence; identical to SEQ ID NO: 13184
  Synthetic

SEQ ID NO: 13186 - protein, 252 aa, Artificial Sequence
  Synthetic
DKLEEILKLLKEVIKTLLRLSEDLNRLNRELVRTVLELLKRVVELLKRVLEEVRKKVRDANTVPDEVIERVARELDRLLKELEDDIRRVAKELEEVHRENEKLLRDVVRDLERLLERLKRELDRNLPEKDLLKTLEDVLRELLKIIARLVELNKRSNRRSTEIIDRIVKSLERVIEELLKIIDKLAKALDDRRDKVERDVRRIKEKIKRILDDLRRRVEELKKKNKEDLEKYDEDIRRLEEEIKRLLEEARR

SEQ ID NO: 13187 - protein, 252 aa, Artificial Sequence; identical to SEQ ID NO: 13186
  Synthetic

SEQ ID NO: 13188 - protein, 235 aa, Artificial Sequence
  Synthetic
REEKELLDEIRKRVKESEDRLEKLLRDYEKELRRLEKELRDLKRRIEEKLEELRRRNLDFKELLKTLEDLLREVLEVARRVVETLKELNRRVLEVVREDIERNERLLRRVLDTLRRKGVDERRIKDLERLIRESLKKAEEVLREAAEKSREIVDEIREVLKRADEALKRIIKKIRETRGKDALSRLLEELLRVVDDLIRVLKELIDKSRKVIEELLELLKRINEENLKVLAEIIK

SEQ ID NO: 13189 - protein, 235 aa, Artificial Sequence; identical to SEQ ID NO: 13188
  Synthetic

SEQ ID NO: 13190 - protein, 242 aa, Artificial Sequence
  Synthetic
SRKEKLLKESEEEVRRLRRTLEELLRKYREVLERLRKELREIEERVRDVVRRLKEVLDRKELDIDTIIKEVEDLLKTVLDRLRELLDKIRRLTKEAIEVVREIIERIVRHAERVKDELRKEGADKRKLDRVDRLIKENTRHLKEILDRIEDLVRRSEKKLRDIIREVRRLIEELRKKAEEIKKDPDERLVKTLIEDVERVIKRILELITRVAEDNERVLERIIRELTDNLERHLKIVREIVK

SEQ ID NO: 13191 - protein, 242 aa, Artificial Sequence; identical to SEQ ID NO: 13190
  Synthetic

SEQ ID NO: 13192 - protein, 234 aa, Artificial Sequence
  Synthetic
SEKEKLREIIKRHLRSVEEVLRLLAKILKDLTDASEENLRLLKELLRRLLEVIRKLVEDVKLDEKILRELEEDIRRLEEELDRLTKELRRKNREALERLRKLVEELRRKHERLERELKDIDKEDILRILADLSRKLKETVEEVLKYLRDHLKEDEDITRRVLDVLRKIVKKIEERARDEDALRKLKKKLEEIEKTVKDSIDKLRELLEELERRVRKIAEENKRLLEELVREVKK

SEQ ID NO: 13193 - protein, 234 aa, Artificial Sequence; identical to SEQ ID NO: 13192
  Synthetic

SEQ ID NO: 13194 - protein, 235 aa, Artificial Sequence
  Synthetic
KDEERLEDELRELTERMREKLKEHEERVRELSKEVKRKAEDSEEKLKKDLKEVEDTLRKKSEVDERALRLLRDILRKLIKLHRDVLERLKRILEELEKLDREVIEKHERSIKRLIEVTKRVRDRETARELLKRLLEDNRRALEEHKRELDKILKKLEEVLRDARRRHDDLLRELRENPVTEELLERIERIIRTSKKLLTEALEIIREIIKRSKDSNRDLHRDLEAILRRIEEAKK

SEQ ID NO: 13195 - protein, 235 aa, Artificial Sequence; identical to SEQ ID NO: 13194
  Synthetic

SEQ ID NO: 13196 - protein, 243 aa, Artificial Sequence
  Synthetic
SDEERLVAELERLIEISLRILEELLEVLRRLVEESLRLLEELVKVAEEIIERLLRLLEETVKDEDRLREIKEELRKLKEKIKRLVDEVREEHRDLLRKIEDLARRVRKKHKELKDKAKEVTKKVRGRERVLKRLSELVKELEDIHKDVLRELKELIDRLLTINKRVLERIDRLLKELLDLVRRDTGDSERLKKTADEIKKRLDKVRKDSDDLAEEIKRILKRVEDESRDTARKVKKVLEDAKR

SEQ ID NO: 13197 - protein, 243 aa, Artificial Sequence; identical to SEQ ID NO: 13196
  Synthetic

SEQ ID NO: 13198 - protein, 235 aa, Artificial Sequence
  Synthetic
SKEDEVLERLKRAIERSIKIVEEIVKRNVETNERSERILRELAETLRRVLDTIRKLLEDKVDEDTLREILERLRRELKELMDKSREELKRNEETLRKLEDESRKEIKTLRDLIKKRIEELEEVKRVVEELIRVHEKVLEDSKDSNRKSVKVHREALKAAEDLLRELDRVLEVATRGDISEEELKRRLEEIERKLKEVLDRLKKKHDDDNKENKDVLDEVRKRHKELLDKLREKRK

SEQ ID NO: 13199 - protein, 235 aa, Artificial Sequence; identical to SEQ ID NO: 13198
  Synthetic

SEQ ID NO: 13200 - protein, 236 aa, Artificial Sequence
  Synthetic
DEEEKVLRILEELLKEHKRVLEELLELVRRIIERHKEVLKRVLKLVEDLIRRIKEANREGRELVKKLEELLRELEEALKRSEDELRKILKELEDLIRKSLRDLERLLKELEDIIRENRDEKDLRRVITEVLKRVEKIHRRVLKEIKKVLKKLLDNHRKALEEIARVLKRLAEIVREANLPEEAAKEVEKRLEEVKTDLRRLARESEETLRRVEERLEELKERSERELKRVEEEIRR

SEQ ID NO: 13201 - protein, 236 aa, Artificial Sequence; identical to SEQ ID NO: 13200
  Synthetic

SEQ ID NO: 13202 - protein, 231 aa, Artificial Sequence
  Synthetic
SEEEELKRILDENHESLKDLLREIKEILRANHETVKKLLETIKEILDTVLKILRDVGLPEDVLRELEKLVRDIKRKLEEALKRHEEKLRRITKELEDMKRRHEEDLRRIREALKRGEIDKDAIADLLRKSLEIVRAILEKIKKVLEESHKTLRDIVRDIEKVLEDLLDMLREARVPEELLETLKRLIRELVKRLEKILDDDRKLIDRLVRRLEEILKEDKRRIEEALERLR

SEQ ID NO: 13203 - protein, 231 aa, Artificial Sequence; identical to SEQ ID NO: 13202
  Synthetic

SEQ ID NO: 13204 - protein, 244 aa, Artificial Sequence
  Synthetic
SELERAEELIKKLLKLHEDVLRRLTEVDDELLEIHDRVLKRLKEVDDELLKLIRDMLRRANISEDLVREVEERLKTLEKRSRDKKRENEKKLRELKKKSEKLRRESRKLLEELRKKVEELRNVDKKDVEKLIKEIVEVHRRMLEKWLRLNEEIAKVHEDSVRDWLKANEEIARTIEEILRRVLRGDEEAKDIREKLERLLRKSEELVRKSLKELKELLDKSKKLLEDSKRRLEEILKEIKDDSR

SEQ ID NO: 13205 - protein, 244 aa, Artificial Sequence; identical to SEQ ID NO: 13204
  Synthetic

SEQ ID NO: 13206 - protein, 237 aa, Artificial Sequence
  Synthetic
DEEDEVEKLIREAIELNKRILEEIKELIERIVRRNKEILREAKEAIERLIKIARDLTKDKSDEKTIEDVLREIRKRVKDLEDKLREANKRLKDDLDRLTRKLEDLHRRLKEKVDRTVEKDKDGQELKRVLDEILDVDRETIKELEDILREIHRIDKETIDRLLEILERILRALEEIAREKDEEKLERIARELKKLLEEVERRSRKAIEDLKRELKRVMDRSREAERKLRELLKETKR

SEQ ID NO: 13207 - protein, 237 aa, Artificial Sequence; identical to SEQ ID NO: 13206
  Synthetic

SEQ ID NO: 13208 - protein, 243 aa, Artificial Sequence
  Synthetic
SEDEVLKKIEDELREVEKKLEDVLREIKRRHDELKKRLDEKLERLRRRHEELKEALDRGEVDIETVRRVVEENVRTDKRILEEAKKVVEENARTDKKLNDEVRELLKRLVDKLRKTVRSDETKLRDLDRVLEKLKKDLKRVIEETRRVLEEVKEALDRILRESERVLREVEKRLEEIKRSPKREEEVKRDLKRILDRLLEVNTKSIEDLKRILDKLLEVNRRNVDEIRRILDELRKVIERVTK

SEQ ID NO: 13209 - protein, 243 aa, Artificial Sequence; identical to SEQ ID NO: 13208
  Synthetic

SEQ ID NO: 13210 - protein, 235 aa, Artificial Sequence
  Synthetic
DETERVKEVLDRSLKLNEDLLRKIDEILKRLFEINKEVIDIIRELLERLVRIAREVLEKNNVPEDKKRELEKILKDVEDELRKYEEELKKKLEDVERRLREYLKRLKETLDRAREILRDTGARREVVKKLIDDSLELVKRLLEEVADDIRESLKRLEDLLRRARRLAEELERLLRELNVREEVEKRIKKLLDDLEKVAREIRKKHKELLEELEKVAREVMDAHRRLLEDLKRTDD

SEQ ID NO: 13211 - protein, 235 aa, Artificial Sequence; identical to SEQ ID NO: 13210
  Synthetic

SEQ ID NO: 13212 - protein, 244 aa, Artificial Sequence
  Synthetic
SLKEIVKEIIDRASELLKRLLERSEDSLRTASELLRKILEDSRRSLRTIARLLEELLRTDGPEEELERAARRVKEELERLHKEIRDVIEEIKKTLKKLNEDLREAIERVKRELERLLKELEDSGVPRELLELVKRVVELMAELLDRLLKLNEKILRDIMKILDEILDLNREILRLVKEIIELIRRDGPDREIEKEIRRILEELKRKHDEIEKKIRELEREIKRKHEELEDRIRKIERDLDRRTK

SEQ ID NO: 13213 - protein, 244 aa, Artificial Sequence; identical to SEQ ID NO: 13212
  Synthetic

SEQ ID NO: 13214 - protein, 244 aa, Artificial Sequence
  Synthetic
SLRELVEKILRDAAKLIERLLKLSEEVLKRIEELLEELLRLSERSLRELLRLLEELLRSTGPEEELERLADRVRREIDKLNKEVRDALERVKEELKRLHDEVDKVIKEVKETLKELLKRLKEKGIPKDLLKLIEDVLRLVMTILDEIKELNERLLRLIEEIIDRLLELNNRLLEEIKRIIKRIRETGPDKDIKKELDDIVRDVKRKHDKLREELKKIVEDAERAHRDIDRKIREILKELKERTD

SEQ ID NO: 13215 - protein, 244 aa, Artificial Sequence; identical to SEQ ID NO: 13214
  Synthetic

SEQ ID NO: 13216 - protein, 241 aa, Artificial Sequence
  Synthetic
REEELRKKIEDELRDLKRKLEDLLRRYEEKLREAEKKLKDLLRRYEERVREIKKELSRNSDEEVVKEIIERLRRSNKELEEMIRELIKILEEASKELEDLVREILEAIRRILKELRDAGALKEKVERDAKKLLDDLRELLERILRESRRLIEELKELLKEVKRRSEELIRTLKEVLDRVKGEDELLRVLEKVIEDNLRIVEELIRRLEEVLKRHEDLVRTLLDLLKRVLEAVKKLLDEAVT

SEQ ID NO: 13217 - protein, 241 aa, Artificial Sequence; identical to SEQ ID NO: 13216
  Synthetic

SEQ ID NO: 13218 - protein, 242 aa, Artificial Sequence
  Synthetic
SSEELLKRIVDEDERVLEEWRRVLEEIKDLSKRVVDLLDKVLKEIEKIVDEVTRRLERDGTDDKKKIRDLVEEIKDIIRRAREKLRRIVKENEEILEEAKRRLDKIAEDNRRTLEKVRKELEETKEEREVKRILERVLREAEDSHRRAVELLEELLDRSRRTIEEAIRLIKELLDRILELLKRLGLPKDLLETIKKRVEEIRRTLEKIKRDYDKAIEEIRRKLERKLEEYKEVIDDLRRKTK

SEQ ID NO: 13219 - protein, 242 aa, Artificial Sequence; identical to SEQ ID NO: 13218
  Synthetic

SEQ ID NO: 13220 - protein, 234 aa, Artificial Sequence
  Synthetic
SSDELLEEIIKEIARLIEELLEILRENLERSEESLRRVLRAIDDNLRRVERLIEALARGEKREDDVVRDVDDSNKKLEDTLREVVKENEKSNEELKRRLEEVVERVRRLLTELRKREEDEKLEDVLRLVEELLRRLDEILKEHEEDNKRLLDLLRDIVRRHKEEVKRALEVARRKEEPKKAMDEELEKIRRDHERLKKEIEDRLRELKDKHRRAFEELKKMLDDIKRKVDEAKR

SEQ ID NO: 13221 - protein, 234 aa, Artificial Sequence; identical to SEQ ID NO: 13220
  Synthetic

SEQ ID NO: 13222 - protein, 247 aa, Artificial Sequence
  Synthetic
DEEEILREILRVAEELSRLNEEVNKRVLEVLERLSRMNEKLLKEVKDVVDRLIELRRRKDLRERELEEELRKLIEELERRLEELERAHRKLVDELRKLLETLKRRHEELARRLRKLLKDVVDEKKRELEEIKRIVEDIERALEESLRISEEIVRTILKALKESLDRIDRVVKEILRLLKELKDSDRDDKEVKRRIEKALRDIEELIERILRRNEEVKREIERLDEENRRRNKEALERIRRLIEETKR

SEQ ID NO: 13223 - protein, 247 aa, Artificial Sequence; identical to SEQ ID NO: 13222
  Synthetic

SEQ ID NO: 13224 - protein, 247 aa, Artificial Sequence
  Synthetic
KDEEELKRRVEKVIRDLERKLKDLEEDHRRVLEELKRELEETKRRLDKVIEEIERVLRRNEKPEDFALEEIRRLIEESIKTLRDLLRKLIKLNEDIARALKEIADEIRKLIEEIVKELRKKERDEDKLRKLEEDLKRLLDKVEKVLRDVEKELTDHNRDAKRAIRELEERYEEIEKEIERLRREVRGKERLIRVLEEILRLVLRLHEEVVRLVRRLLEESHRILRKIVELLREILEDLKKILDDIRR

SEQ ID NO: 13225 - protein, 247 aa, Artificial Sequence; identical to SEQ ID NO: 13224
  Synthetic

SEQ ID NO: 13226 - protein, 233 aa, Artificial Sequence
  Synthetic
DEEDEIRKRLKELLDDVKRRLDELRRESERLLKEVDDLLRESKKRLEDEKKKLEERGLSEEVKKVLKELERVHDENLKLIRDWLEKHVRINETLLKLIAELLKILEDVMDELTKDRTTKERVERLLRTLEEVLKEVADRIRKLSKKDKEDLDDILRRSKESNERLREVIKRLAEKGVDKEVLERLEKIVRRNEEVNDEVRELVTRLNETSNRAARELLELAKRIIEEIKKAVK

SEQ ID NO: 13227 - protein, 233 aa, Artificial Sequence; identical to SEQ ID NO: 13226
  Synthetic

SEQ ID NO: 13228 - protein, 235 aa, Artificial Sequence
  Synthetic
SKLETIKELLERLHELNERAVRELKKTLEDLHRDNARLIEELIRKNERLLEALREKVRDERLLTELTKLNEESIKRLEDILKKNRDLLERIKEDLDRLLKKNEELLRDIKRRLDETNSREEELIRVAEEVLRRDKKSHEELLKIAAEVIKRDKESHDELLKVHRENLELIERVLKESGLSEDADRDVKRLKEESEELLRRSKKRADDLKREVERLLEESRRRLDELLKELKDRSK

SEQ ID NO: 13229 - protein, 235 aa, Artificial Sequence; identical to SEQ ID NO: 13228
  Synthetic

SEQ ID NO: 13230 - protein, 245 aa, Artificial Sequence
  Synthetic
SRLEEIKKLLEKVMELIRRIAEELLRINEKVLEVLERIVRTILRLNEEHLKDVRDIARKLKLSDEILRRAEEIVKRSKEELKRLLEEAREIVKKSKRKLEELLKRIEEVVRDAKRKLDENKDSDERTLLEILKRILEELRKLIEELLRIHEESLRRIAKILERILRLNDKSLRDLERIVREAVRERNDDSTEIRKRLKELRDKNEELKKKVEEMIRRLEEESKKTKKRVEEILKRIEEEVREKAR

SEQ ID NO: 13231 - protein, 245 aa, Artificial Sequence; identical to SEQ ID NO: 13230
  Synthetic

SEQ ID NO: 13232 - protein, 237 aa, Artificial Sequence
  Synthetic
SREETLRERIERIKRKSEEDVERIKRTLDREREENEETVRRIKETVDRLREEVERELKDDKSLEEIIRRLTELLKKLLEVHEDALRRLDELVERVLRVHEEVLEELKRLLELLEAGLDRKDVRKRLKDILERVRRLHEKLKEELKRILDEYEKKLRELLKELKDILKDAEELLKSQPKSRELDRVEEIIRRIVKKLEEILRDLKRRAEDHIRRLTELIERSLKIVRDLAEDIRRAIE

SEQ ID NO: 13233 - protein, 237 aa, Artificial Sequence; identical to SEQ ID NO: 13232
  Synthetic

SEQ ID NO: 13234 - protein, 238 aa, Artificial Sequence
  Synthetic
DADELLRRLAEEVERVIREAEDLLRRWKETIKKVLDDLKRLLDELKKRNEDVIRELTKTKGDEELAKLIKDLLDTNEKVNRDLLRLIKKLLKDAERVNRRLLELIEELLEELKRVAKDLGLREEADKKLRDIADRARKELEDYERRLKELLKTVEDALRKAEEDSRKLKRDVEELLERGRLRKDDLEDILRKNLDRLRKLLERLREILRENLEALKKTLKRLEDVVREILEDLKRERK

SEQ ID NO: 13235 - protein, 238 aa, Artificial Sequence; identical to SEQ ID NO: 13234
  Synthetic

SEQ ID NO: 13236 - protein, 238 aa, Artificial Sequence
  Synthetic
TEKELLEELEEDVKRVIEELERLLREWKEELRRVLEESERLLRELRERNKRELEDIRRIKEDEALRERLKRLLETNDEVNKRHLKLIEELLRRIKEVNRRLLEEIRKLLEKLKEVLDRAGLDEEAKERLERILREVEADLRRYEKELEDLLDKVKKELERTREDSKRLVDEAKKLLEKNKLDLEEVTRILERNLKELERNLRDLDRTVKTNERLLRELLKKLRDIVRTILELLERKTK

SEQ ID NO: 13237 - protein, 238 aa, Artificial Sequence; identical to SEQ ID NO: 13236
  Synthetic

SEQ ID NO: 13238 - protein, 236 aa, Artificial Sequence
  Synthetic
SEKEDVRRKLEEDREKHERDLRRIEEELRRTIEESERRLKEVKKRLKELIDDVRRRDSDDRTLLEKIIRDVEKLVRELVEDNRRAIEKVKRLLEEIVKTHRDNIENVRRLLEEKGVPEEVREELRRIVEESERVVRRIEEELEKIVKDSEDAVREIEEDLERVLEKAKRLAEKLKDKEELKKAVETILEELVRIADKLIDIHREILEKLLRVAEKLLEVSRRALDKLKKLIDKTDK

SEQ ID NO: 13239 - protein, 236 aa, Artificial Sequence; identical to SEQ ID NO: 13238
  Synthetic

SEQ ID NO: 13240 - protein, 231 aa, Artificial Sequence
  Synthetic
DKAEVLREALKLLKDLLEELIKIHEESLKRILDLIDTLVKVHEDALRKLKELLERSGLDERELRKVERMATESLRTIRKLKEELRDLARRSLEKLREDLKRVDDTLRKVEEKVRRTGPSEELIEELIRTIEKLLKEIVRINEEVLKAVRELLKTLLKLSEDVVRRIEEILRKRNVPEEIDRELKRVVEELRRLHEEIKERLDDVARRSEEELRRIIKKLKEVVKEIRKKLK

SEQ ID NO: 13241 - protein, 231 aa, Artificial Sequence; identical to SEQ ID NO: 13240
  Synthetic

SEQ ID NO: 13242 - protein, 235 aa, Artificial Sequence
  Synthetic
REKEEIERTLEELKRILDELVKDDKKSLDRLREIMERSVRIAEETLRKLRETLELKARGEVDEDKLRELAKRLRDDLRRVSREHDEVRKRLKEEHDRLEKKIRDAERRLKTRLDELVKEKGRRIRELEEVLTEASRLLKEILDVNKEILDRAEELLRRNEKVIEEILRAVITLIRRDDDKDEVLKRLDDLIKEWRDVLEKLLRDLRELLERSKKRLRKVREDLKRLLEELERRAD

SEQ ID NO: 13243 - protein, 235 aa, Artificial Sequence; identical to SEQ ID NO: 13242
  Synthetic

SEQ ID NO: 13244 - protein, 236 aa, Artificial Sequence
  Synthetic
STREKAKKVLDTLRRDNEDMKRVVEKILRALKRTNERAEKLAREITEEIKRILKEVRVDRELLKEIEDTLKRVLEEIKRLLDESKKLLEDVEREIREILKTSEELLERIEREIETVNRDEKTLKEILKRLLELNEEMNRRLLKILRDLLRLNEEVIRRLLAVLERLLDALKEALDRGDVPEDLLRKLEEELRRIKEKLRKALEELEREHRELEKELDKLHDESRKEHERIEEELRR

SEQ ID NO: 13245 - protein, 236 aa, Artificial Sequence; identical to SEQ ID NO: 13244
  Synthetic

SEQ ID NO: 13246 - protein, 247 aa, Artificial Sequence
  Synthetic
DKERVLEDVKRRAKELEELLKEVEDRYEEDLRRIEETLKDTERRYREKLEKIKEELKRTVRRREVLEVIKELLKKLEDNIRELLDAIREALERLRRINKRILDILRRAIEEIKKILDEISRVDEKRELKKIKEEIDKLVDEIRRRLEELEKESEKVVKELEDKLRESVKRSEEIAKEVTDDLRRKNVDEKIKRIVEKIIKEHRDVLERLKRIIEEITRSDRESLERLKEILKELIRILKELADRERK

SEQ ID NO: 13247 - protein, 247 aa, Artificial Sequence; identical to SEQ ID NO: 13246
  Synthetic

SEQ ID NO: 13248 - protein, 242 aa, Artificial Sequence
  Synthetic
KSEDVVRELIKLHRELNDKARKVIETILERNRELVETAERVIRRLIKLLEDALRILKKSSTDEDEVRRAEELVRTLKEKAKRVLEEIRKLSKELEEKIRKVLEEINKLSEDLERKIEELTRKVRGEERLLEALTELLKDSIDILRTVLDLLRKLLETSLRILERVLELLKELLDDIREILRRLRLEEEELRRLEEEIRDIVRRLRKRVEEYRKELEDLEKELADEVKKYEDEVKRIREELRK

SEQ ID NO: 13249 - protein, 242 aa, Artificial Sequence; identical to SEQ ID NO: 13248
  Synthetic

SEQ ID NO: 13250 - protein, 234 aa, Artificial Sequence
  Synthetic
STEELLREIEEIIRRILEIADKTSKEWADLIKRILELIKRNLEELRKLVREVLEEVRKEGTSDRRVEEDLKRLLERYRRELEKLKEELKKVLDEHKKELKRLKDKLKRLLEELRKRVDDQDKTVLEEVLKEIADVVREITEVNKELARIIEELVKKIAKLSEEVLKTVEELIEELLEDKDTIDKLRKRLKEIKDRTKELLDRIREEIRELRERNKEIVKDIERRLRELKDRIRK

SEQ ID NO: 13251 - protein, 234 aa, Artificial Sequence; identical to SEQ ID NO: 13250
  Synthetic

SEQ ID NO: 13252 - protein, 243 aa, Artificial Sequence
  Synthetic
SKKELVREVVKELHELNKDVLRVLTEIVERVKELDKRVLEVLRRIVEEVERLAKEAGLDEDELRKLIEELRRLLKRIEDEVKRLNDELDKKLEELRKESEDLNRELEKTLRDDERKDSREDRVVRDIARILKTVLERNLRKIEEAARILMEYIERVKDLWRRAAELLKEILRRLLKLLKDKVTDKDRLREIEERVRKILEEIDKLLDDLRKAYDRILERIERLVRELSRKHKEVADKITELVK

SEQ ID NO: 13253 - protein, 243 aa, Artificial Sequence; identical to SEQ ID NO: 13252
  Synthetic

SEQ ID NO: 13254 - protein, 237 aa, Artificial Sequence
  Synthetic
SEDERVTRLKEELERLLDELRKRYEKLREEIRRVLEDLKKKYDELKEELDKMLRDLERRGKVSEEVLKVLRDVAARIEENLRRNLRLVAEIVRKLEELMKRNLDAIRELIEDVKRLLEIARRVKDERELKRIIEEIRKKIEKLLRESDKEVKDVDRDIKRALEESKKTNEKLLRDIERAGIDEELLRELERVSREDERLVKEAADELRRILDTDRKLLKEVVDTLERVLRRILKETR

SEQ ID NO: 13255 - protein, 237 aa, Artificial Sequence; identical to SEQ ID NO: 13254
  Synthetic

SEQ ID NO: 13256 - protein, 243 aa, Artificial Sequence
  Synthetic
SEEERVEELLRRIEKLLKESEEDVERLKKRHEEENRRLKEEVKRLMDELREILRRLEEETGEDRLVDILREIARRLEELLKRILELHDRSARILEELLERDLELLKEIVTEAKRVLEIIKRDGPTEEVKKELERLKKRVDEILKRSKDEVRKWKKAVEDAIRELRKLLKEVKDRVKELIERQRRDKDVDKLVEVLDRVLRRVRELLEELAETNRESIRRYERLSEKNAELVTEIIERLRRTVK

SEQ ID NO: 13257 - protein, 243 aa, Artificial Sequence; identical to SEQ ID NO: 13256
  Synthetic

SEQ ID NO: 13258 - protein, 247 aa, Artificial Sequence
  Synthetic
SKMEKLLKDLREALEKVKRRYEELERRLDEVLKEHEEIVKRLLEELEKVLKRIEEGGLPEEELEKLKKLAEKVKELLRELLRLSKELVDRVRELLKRDLDLVRRLVEIALKVLRERREQPNDEKRVEKIKRDLEKKARRVREENERIKRDLKRTADESRKRLEKLLEDLKRELDRLREDLDRARKDIDERVEELIERLIRIIERLLREVIKSHEKLVRTIERLIEESIRVNEELLEVIERLLDRARK

SEQ ID NO: 13259 - protein, 247 aa, Artificial Sequence; identical to SEQ ID NO: 13258
  Synthetic

SEQ ID NO: 13260 - protein, 243 aa, Artificial Sequence
  Synthetic
DLERVVEDIVDKAKRLLDKNLEVLKRIVDEVLRLLERLLRESRKVVKRVKEIIEELVRDEKELRRVKRALEEVLRRHEEIAKELKERLRKVAKEAEEKHKKLVEDLKRVVDEVRKKLSQPLDRKKVLEVLDELVTIIAKLLDENIKVLEEVIRVIAELLERLLDSHRRLIDIIAKLLEELRPEDKDLLTELEKKLRKLKRDSEKVVDDLKKELERIKREVKRLIEENRRTLKDIKRAVDEARK

SEQ ID NO: 13261 - protein, 243 aa, Artificial Sequence; identical to SEQ ID NO: 13260
  Synthetic

SEQ ID NO: 13262 - protein, 245 aa, Artificial Sequence
  Synthetic
DEDELVEEIERRLREIEKRLRDVMEESKRRLEEILRELKRIIDESRKRLDDLRRRLKDVSEEILRIVEEIIKINEDNLRNARRILEEIIRNNEDLLRKIEELLKEIIKIVRELLKLLKKDGTLDDRILKEVKERADRLRERLKRIEKKHKEDADKIREDLERDERKHEEDAKRIREELDRLRKDIDERIEKILEEILRLSRESLRKLKKILEELLKVSEDSLRDLIRILEDLLRLLKDLLEKLKK

SEQ ID NO: 13263 - protein, 245 aa, Artificial Sequence; identical to SEQ ID NO: 13262
  Synthetic

SEQ ID NO: 13264 - protein, 235 aa, Artificial Sequence
  Synthetic
SEDEELEDLKRKLRRALERYEDRLREIKRRLDEKLKEIKRDYDRLKKELDDLLREIERRGVKDELLERALELIKRLLDKSLRLIEEVLRELKRLLDTDLDILRRILEEVARLIDEVRSGSRPGEELVREIKKVLDKVKEDSERNVREIERVLEEVEKRSREIVREAEEVLKEVEDRIGRDEVVKELLDLVREIIKRLKEIHEEILRLIETVLEDLERANRRLLDLARKILEDARK

SEQ ID NO: 13265 - protein, 235 aa, Artificial Sequence; identical to SEQ ID NO: 13264
  Synthetic

SEQ ID NO: 13266 - protein, 242 aa, Artificial Sequence
  Synthetic
SKEEKLEDLIRRIKERLEEALRRNKKTADEIRKELKKATDRNRKRAKELRERLREVLRRTKEDKVIKELERVLEEVLRKLERSLEELRKLLDKILKKSEENAKEIKDVLDRILERLRKREEDEESMKRILEDLKRRLEEMAERSRKKIKDLEKEIEDILRRLEELHRKIKRELEELLKRITDETGPSEVVEELLRLLEELLEHNREVIEKLVDLIRELLRHDKEVTEEILRLIEELLKEVEK

SEQ ID NO: 13267 - protein, 242 aa, Artificial Sequence; identical to SEQ ID NO: 13266
  Synthetic

SEQ ID NO: 13268 - protein, 239 aa, Artificial Sequence
  Synthetic
SERELIERWLELHKEILRLIRELVERLLKLHREILDTIKKLIRELLELLEDIARKLNLDKEAKDELREIKKRVEDKLEKLERESRKVEEDLKRKLKELTDESDTVEKRVRDVVRRNTQRREEIAEELLRLDRKLLKAVEELLKEILDLNKKLLDDVRRILEETRRVLEKLLDRVRRRERTDDERRTLTELLKRMEDILEKVERTLKKLLDDSKRMAEEVKKTLKELLERSEKVAEDVRK

SEQ ID NO: 13269 - protein, 239 aa, Artificial Sequence; identical to SEQ ID NO: 13268
  Synthetic

SEQ ID NO: 13270 - protein, 233 aa, Artificial Sequence
  Synthetic
SEDELIRRIREELKRLEKEHEDMVRELEKKHKKLKEELDRAIEEIERRLRELKERVEREGNGLEVLKKVLDALRKLLEDLREILKRLVDANRELIKENHKILKKLVELLERLLKLLKDGVPREEIRKEIKKISDDIRRLHRDLERRSKKLDDDLKKELDEIKKRAEDLLRKLKEDGLDDELVKEIKRLLEELLRLLERLVRSSRRLNEELLRLSEKLIRDAERLARELLEAAR

SEQ ID NO: 13271 - protein, 233 aa, Artificial Sequence; identical to SEQ ID NO: 13270
  Synthetic

SEQ ID NO: 13272 - protein, 241 aa, Artificial Sequence
  Synthetic
KKEEDLRREVEEVKEEIRELIERSRESVRRILKEIKDLIRKSKESIDKILEDLKRKNLDETLIRAVEKLLRENLELLKKLLETVKELLERNEELLKRLVEEAERILEELLEVARRREDEKALERVVREVEKELKRLDDELKKALKDSEEELKRLEDELRRAKEENEKTLKKLRDDLRREGRDEEVLRVVEELLKLLKEHLEENVRILRRILELLRRHHDTNRKIVKRILELLRRVLESIRK

SEQ ID NO: 13273 - protein, 241 aa, Artificial Sequence; identical to SEQ ID NO: 13272
  Synthetic

SEQ ID NO: 13274 - protein, 241 aa, Artificial Sequence
  Synthetic
SVEEILRELLRVLEEILKRIADINEKLLRVSRKIVEDLKRLLDEALRVLRRAVEEIEKEGRDEKEKEKMRRVLEKLTKEVEDLKKKIEDVLRETEELSRRLKEELKDILRRLAKAVEDIERRRLDKEKVKKLLEDILREIERVIRESLRLAEEDVRKLEEIIKEILDLIERAIRIVEEEAGRDERLREILEELERVLEKVMRDLRRILREYEEVLKEAREEYRKILEELRKVLKEVDDRLR

SEQ ID NO: 13275 - protein, 241 aa, Artificial Sequence; identical to SEQ ID NO: 13274
  Synthetic

SEQ ID NO: 13276 - protein, 243 aa, Artificial Sequence
  Synthetic
SELEKIDRLLEKVLRENKRALDELVRLLEELIKTNRDALEKLREINERNIERLREEVKDVSERVKEELKRVAEESRRLIKKLKEDSEKTVRELRKLIEELRKRSKETIDRLRELIKRVREKGRRDKEAVKRLVDIHRRNLELLEDVVRKLLKLHEENLRLLEEAVRRILELDKKVLDKLRKDLDKKVLEDLERHLEESKKTVERLVRELRKTHRKVEEDVKRLIEELRRLHEELRKRLEDDDR

SEQ ID NO: 13277 - protein, 243 aa, Artificial Sequence; identical to SEQ ID NO: 13276
  Synthetic

SEQ ID NO: 13278 - protein, 243 aa, Artificial Sequence
  Synthetic
REKEELIKLIRDILEKLREHSRTIVELLETILRVVREHSKRIEKLLRELLDILRRQTLRDEELRKMLEDVERDIRESLKRLEELLRDIKRRIDESLRELEERLKELEKRIEELARRANKDITTAKRLLDVLKTLLKLNKESIERLLKVLEKLLKDDAESIKRLLDVIRELLKELKDVEEKRRPEKEVEDLLRKAVEDIEKLIRENEKLLEDVLRTIRKLIRENEELLRDIVEKIKRLADEARK

SEQ ID NO: 13279 - protein, 243 aa, Artificial Sequence; identical to SEQ ID NO: 13278
  Synthetic

SEQ ID NO: 13280 - protein, 247 aa, Artificial Sequence
  Synthetic
SEEEEVKKVVDEIKKVLDELRKANEDSARRLREVLEELRKRNEESKKEVKDLLEELKRVKRDEELRRVAETLLDVNRRNLEINVKVLRELIRISEDNLRINDEVAKRILDLVRELLKELEKAGLSREEIEKRLRDLEKKVKELKERATKLHKELDDALKETKKRVKKMHDDVRKKVKELRELSKDKDTDTKVKELIEIVDELLEIDDRILEEIERTVRKVIDLNRKVLEDIEELVKEAIKVLEEIAK

SEQ ID NO: 13281 - protein, 247 aa, Artificial Sequence; identical to SEQ ID NO: 13280
  Synthetic

SEQ ID NO: 13282 - protein, 233 aa, Artificial Sequence
  Synthetic
DEEEELRELKERIERTIEKLKEDTKKLKKELEDRIRELKRKTKELLDDMKRLIKEVKDKGDRDEALEELAKVSEDNLRINDEVLEELVELAKRLLKLNVDVLDELRRLVEEILKARKDGKDRSDLERVVKELREILDKLRKDNERVVKRLKEVLDELRRRNEESVRRLEEILRDRNLNEDIIRLVRDLIRLNREHLRDLEEAVREIIKLLREHLERLERVVDRMIRELRKAAK

SEQ ID NO: 13283 - protein, 233 aa, Artificial Sequence; identical to SEQ ID NO: 13282
  Synthetic

SEQ ID NO: 13284 - protein, 241 aa, Artificial Sequence
  Synthetic
SEEEELDKLRRELEELAKESTREVKELLRELREMLERHKKRLKEIKDKLDEDIKREDSKKDMVEEAVKVLRDILRRHKEVVEELAKVLEKIAEILERLHRRNLKLNREILKRLRDDPRGERLREELDRLVRRLEESNDEIRKALEDLVRELRELLKRIEDDHRELARRLEELLKRIIDRDGRTDELERLKDLLRTLIKKLEDLLENLRRLVERVIESLRRLVEKDEEINKRTIKELRRAIE

SEQ ID NO: 13285 - protein, 241 aa, Artificial Sequence; identical to SEQ ID NO: 13284
  Synthetic

SEQ ID NO: 13286 - protein, 243 aa, Artificial Sequence
  Synthetic
DEERIVDKILKVIRESAEALRKIVEDVLRVLEELMRRHKKNVEELDTIVEDLLRKVRERVDKDELERLKREKEKDRERVREIVDKYRKVLEELKERLERVLEDYRRKLKEVEKKVKEIRDRKDEKDEKTVVDEIRKLVEELLTLDRKVLEDLRRLAEEALRKDREVSELLRDLLRRIEEKLTSTRVEEEVLREARRRIREVERHNKKVHDDARKRLRDLVEELKRLHRELEEKLRRIIEEIDR

SEQ ID NO: 13287 - protein, 243 aa, Artificial Sequence; identical to SEQ ID NO: 13286
  Synthetic

SEQ ID NO: 13288 - protein, 242 aa, Artificial Sequence
  Synthetic
SEDEKVRKLLRDLAEEIKRLLETYDRKLKEIAKRIEDTLREYRERLEELKRRLEELVRKKNKDMTVIEEIDKLVRETLRRLEEIIDRILKLVKENAKLLEDIARRILDLIKKLLEILEEGRDRKEVRKAVEDVLRDVEKKLKDLLKHTEDSVTRVERLLKELKDRTKKILDDIKRRLDEEAKVEELVREIRRTLETILRLNEELLKRIRDVLREIIELNREVIERLREILERLADLIRRRAE

SEQ ID NO: 13289 - protein, 242 aa, Artificial Sequence; identical to SEQ ID NO: 13288
  Synthetic

SEQ ID NO: 13290 - protein, 245 aa, Artificial Sequence
  Synthetic
SELEKLARLLEEILELLRELHRKTAEALKEILELLDRHLDDLRRAVKEILEDLDKDLEDERRRELEEKVERVKETLKELLERLRKRNEDVKRELERILRENEKRLEDVKKTLEDVLRRLADLVRRGKGEEELKRVLEELLKLVKEVLDVNRRSVERLLELARRLIEENEKVLRELLELVRRVLEELLRDDDKAKKVREKLEELLRRLKEKNDDLRRKLERLARELEKLHEEVKKRLKELEDEARR

SEQ ID NO: 13291 - protein, 245 aa, Artificial Sequence; identical to SEQ ID NO: 13290
  Synthetic

SEQ ID NO: 13292 - protein, 245 aa, Artificial Sequence
  Synthetic
RELEKLAEVLERIVRALETHLKLIADVLREILRLLDEHLKIIKKVVRDILRELDEVLRRRDDETLERTLERMKRRLEEVLDRLEKENERVKKELRERLERLARENEEVIERLKKLLDELRKARENGKDESVLRRVLEEVLRLVKELIDRNREVLEELLKLAETLLRINTDVLRKLLELVEEILRRLVDDSDTLEKLRRRLEDRRRKLKEANDRVREVLDRLRKELEEIDKRLEDVLKKLREDLER

SEQ ID NO: 13293 - protein, 245 aa, Artificial Sequence; identical to SEQ ID NO: 13292
  Synthetic

SEQ ID NO: 13294 - protein, 241 aa, Artificial Sequence
  Synthetic
SKKELLEEVVRRAIELLKRHLEKLKRILEEIVRLLEEHLEKVERVLEAILRLLDDLLRRVTDERLIRTLEDVKRRLREILERLADENRKAIKRLRDLLDKLEKRNKEAIERLEEILEELKRVRRDEELLRVLETLLKIIEDILRENTKVLEDLLRLVEEILERNLRVVEELLRLAREILTEIVTDKDKLKEIEDELRRLLEELRRLDKKIKDRLRELKKDLDEANRRIKETLKKLLREVEK

SEQ ID NO: 13295 - protein, 241 aa, Artificial Sequence; identical to SEQ ID NO: 13294
  Synthetic

SEQ ID NO: 13296 - protein, 238 aa, Artificial Sequence
  Synthetic
SDLEELEKLIRRLLKINEDLIRIIEDLIRKSLTLLKRIVDLIRELIREIEEIIRRTNIPKELVDEAREKIKRILDEVERLLRELKKRHREILEELRKNLERVRRELKKILDRLRDLKRKNAREEEIRKLIEELLKVHKESLDSIRRLIEKLLRVHETALRRLAELIRRLLEVLKEVLDKVPVSEEIRKRVRDLEEKVKKLLRDLEEESRRVAEKVEEDLKRVEEESRRTAREVEEKER

SEQ ID NO: 13297 - protein, 238 aa, Artificial Sequence; identical to SEQ ID NO: 13296
  Synthetic

SEQ ID NO: 13298 - protein, 244 aa, Artificial Sequence
  Synthetic
SKEERADELLKDLERKVDKLRREHEELLKELKRKVDELRKEHKKLLDTLREEVRRIEEKVKEEEELRKVIRELLELLERNVKKNIDVIETLLRLLEDLVRVNVKVLKEIVDELKKIVEAIKRGEDRSEVDRAIKRLEDILEKLARENKRVMDELRKLLRTLREENKRSIRALEELLERLRRRVKSEDVLREITRLLEKAKRIIEESLREITELVKEIEKIIKESLDAARRLLEEIKKILEELAR

SEQ ID NO: 13299 - protein, 244 aa, Artificial Sequence; identical to SEQ ID NO: 13298
  Synthetic

SEQ ID NO: 13300 - protein, 241 aa, Artificial Sequence
  Synthetic
SIEELARKLVKENRRLATEANKILKDIVKTNRDSIRKVREILKELVERLRDLIRKVRRDGDDDERKLEEIVRELEKRLEEIKRKLDKVVKESEDLIKEIEDKIRELDKRSEDKLREIEERLKDSGRESVEKVLTELLKVHEDHLRELIKVLDELLRLNDESVRKLKELVEELLRVAEDVVRKIKVDEDLKRELERAKRELERLLRELDEEHERMKKKVKDEIRRLKKESEEVKKEVKDTED

SEQ ID NO: 13301 - protein, 241 aa, Artificial Sequence; identical to SEQ ID NO: 13300
  Synthetic

SEQ ID NO: 13302 - protein, 239 aa, Artificial Sequence
  Synthetic
DEEEITRKLEETIRRLEEEIDKIIKDLLRMLEENNKEIKKVIEKVLETSRRILSALARNVSEEELDRILKEYKELLDRLRERSEELKKEDERLVRDIRRTLKELLDRLKELVDRLIEERGRTKLVELIDKLLKVLEEALREIKRVIDELNTVNRDANRRILEVLDKNLELVKRIIDLAKERRTEEVLREAEKRIRDSAEEVKRILEEHKERLRELVKKLERVKETVRKKIEELREEAKR

SEQ ID NO: 13303 - protein, 239 aa, Artificial Sequence; identical to SEQ ID NO: 13302
  Synthetic

SEQ ID NO: 13304 - protein, 232 aa, Artificial Sequence
  Synthetic
SELEKDLKDAEEIIKELEEINKRLLEEIRRIVERITKINRDLLETVKRLIEELIKEDSVDEKVVREIEEELRRIKEESKKVEKDIRELLRRITKKSEEVAKRLRELLEELRRANKPKDDLLREILEVLETALRMLEESLKELRRVLEELLKASKRTLEKVKEVLKRLLEKARKGVDEERLKEIEERIRRTEEDVKRKHDDVRRELDEEDDRYKRELDKVRKKLKEKADRIRD

SEQ ID NO: 13305 - protein, 232 aa, Artificial Sequence; identical to SEQ ID NO: 13304
  Synthetic

SEQ ID NO: 13306 - protein, 232 aa, Artificial Sequence
  Synthetic
SKLEDLLRKVEEIIKEIERINEELLKRVAEIVETLLRENKKLLEEIKEILKRLIEDGSVDEEVVRKLEREVTEIEKKSKKVADDIRRKLRKLIEESREVVRDIKRKLEELKRANKPKDDLLRDILRVIKRLLERSAEIVKRVEDVLEELLKLLKETLDELLEVLKRVLDEVRKNVDERKLDKIRKDLERVVREYEEKLKEVRKRLRELVERVKEKHKRIEEELRKTAKEVRD

SEQ ID NO: 13307 - protein, 232 aa, Artificial Sequence; identical to SEQ ID NO: 13306
  Synthetic

SEQ ID NO: 13308 - protein, 242 aa, Artificial Sequence
  Synthetic
SSKELVEKLKELIKDHLRVADEVIKKLEELIRRHLRKVEEIARRLEELIRELADELRRAGIDEKELDKIRKEIEKVLRELKRLLEELRRDHERVLKELEREVKRLRDDHRRILKELDDLLRRGLDKKELLERVRELAERLNKLVEDILRRVEELLRELSKKVKELLKRVERLLREILKLIRDAGGDRRRLDRLEEKVEKDLRKLARELEDVNRRLEEELRRLEKRSEDLNRRIREEIKKDAK

SEQ ID NO: 13309 - protein, 242 aa, Artificial Sequence; identical to SEQ ID NO: 13308
  Synthetic

SEQ ID NO: 13310 - protein, 238 aa, Artificial Sequence
  Synthetic
KDDEILRKLLEILERLLKLSEEVLRELLRLLEELLRLSKESLKRLSRLLEEALKTLVEEEGREDETLERLERELRRVERKYKEDLDDILRKAKRLLEEAERLHREIRDRLRKAAEKKDEGDRDELIRRIIRLVRELTKINDELLKRVEDILRELAKLNEELIRTIKELLDRLVEKLVRRERLKAVVDRIEKAIKKVTEDSRRLVKRIETELRELVKRSKDLAREVEKRLKEVVEEAKR

SEQ ID NO: 13311 - protein, 238 aa, Artificial Sequence; identical to SEQ ID NO: 13310
  Synthetic

SEQ ID NO: 13312 - protein, 242 aa, Artificial Sequence
  Synthetic
SDLERILDKVTKLAEDAKKLAKKSVDLHRDNIRRLKTTLKRILESLRKAIKRLKDALRRGPRSERVDTLIRRIDKLIKELEDEVREIERRIDELSRRLEEKYKEVIKRIDKLVKDLRDLARRGVDRKDLVREILRILREIIETLRRLDEEVLKVNEEILDLIEELVRSILKVLEEILRLLVEETGPSEELEELKRDLDRLFEKIRTDLKRLRDTNRKLFDDLRKEHEAVEDKVRRVAEELTK

SEQ ID NO: 13313 - protein, 242 aa, Artificial Sequence; identical to SEQ ID NO: 13312
  Synthetic

SEQ ID NO: 13314 - protein, 232 aa, Artificial Sequence
  Synthetic
SEEDLVREVLRAIKRILELLTTLSKENLEVVKRIIEDLERVARENLRVIEEIIKKINVDEEMKKELDKELKRLEDEHRKAIRELEELLEEHKRRLEEIRRRVDKELEDIKRANLPIEDLLKVIDDVVRKLLRLVKEDLESLRRIVRKLEELLKKNLKLLRDVLRKLEDIARKKNVDERIIEEIRRTATEVLKRNEAVVKKIRELIKRVTERNRKVLEEIKELVKRIKDELRR

SEQ ID NO: 13315 - protein, 232 aa, Artificial Sequence; identical to SEQ ID NO: 13314
  Synthetic

SEQ ID NO: 13316 - protein, 237 aa, Artificial Sequence
  Synthetic
DKEREIDDIAEKLRRKYKKLREDLDRIEEELRERYERLKRKLDELARRLTKKARDENSDKKAVEELEKMIKELLDRLRKLIEDNLRVVEEIIKLIRELIDRDVEVVEELLDILKKVRTEEMVERIERRIEELLKETERLLKEVLDRAKKLHRDSEELVERVERRIKELTDEIKRLIEENKVDERLEELLKEVVETLRRLLEELKRLSEEVLKKAKEVIDRIRRLSEEVVKSLRDAAK

SEQ ID NO: 13317 - protein, 237 aa, Artificial Sequence; identical to SEQ ID NO: 13316
  Synthetic

SEQ ID NO: 13318 - protein, 242 aa, Artificial Sequence
  Synthetic
SEEEELDKLLKEYERVVREIEEKLDRVKRDIERLVEEITRDLRRVLEEYRKVVEELAKDEGDTSEILDTDMKIVEDLLRLLKEILDKILKLIEDALRVLKEVLKRDTDIVRRIIEILRRGVSEKDLKEILDRWEEENKKLLEEIKKILDKVRDDVRKLVEEVRKALEDWKRTLEDLLRKEGQESDTARRIERLSREVIKKLEKALKELEDLVREVLRRLKEAVEEIHKLSRDVIKMLTDATR

SEQ ID NO: 13319 - protein, 242 aa, Artificial Sequence; identical to SEQ ID NO: 13318
  Synthetic

SEQ ID NO: 13320 - protein, 246 aa, Artificial Sequence
  Synthetic
DDEERLKKVKEEIEEKAKRLKEDLERALKRYEDIIKKLEDDNRKVLERIRRKVEELKKNRVTSKDIEKALREIIEEIKRLNRENVKEIRRLNEEVKELLDRILRALEEIIREITDLLDKSVKDEEKLRKIKEKLEKVLREIEKDVRDLKRKHDELLKRVDDISRKIEEDLDRVAEKIRRILSKPVDDELIRKALEELLRIAEEILRRDLRLLEENRRVVKESLDVLAELLERLLELLERILREVRK

SEQ ID NO: 13321 - protein, 246 aa, Artificial Sequence; identical to SEQ ID NO: 13320
  Synthetic

SEQ ID NO: 13322 - protein, 234 aa, Artificial Sequence
  Synthetic
SERDVLRELLERIKKLLETLIRIVEELVRRSEETIKRLAELNRRLIEEIRRIVEEVKKDVEEEILRDVERLLKELADETEKILREVKKRLDDNLKRLEEIVRDVERLLKELKEEVDRGDKSKEELVREILKVAEEILRKIEELVKHHLDLNRDILRLFTESAEKLEEILREVLRKLRLDEEVKKRVEELRREYRETLKRLRDESEKIAEELKRLLDELRRRLEELARELRERTK

SEQ ID NO: 13323 - protein, 234 aa, Artificial Sequence; identical to SEQ ID NO: 13322
  Synthetic

SEQ ID NO: 13324 - protein, 235 aa, Artificial Sequence
  Synthetic
TEEEIIKEIVKLLRDLARLHEEVDRTNKRLLDELVRLHREVDERLTRLAEDLIRLAEKGASDDEIRELLKRIADELERLKKELEEINKRHRDEVERLKEELRRLNEEIKRRVEELKKDLREEAVRILEEILEMLRRISEKNLRVNDKIHETIERISRTNLKVLDDILRALEELAKAKLDRKDLRKVVEELRRRIEELNRRHDKLAEDLRREIEELNKEHKRMLRELEKKIEDDRR

SEQ ID NO: 13325 - protein, 235 aa, Artificial Sequence; identical to SEQ ID NO: 13324
  Synthetic

SEQ ID NO: 13326 - protein, 240 aa, Artificial Sequence
  Synthetic
DAEEILKEIHEIDKRTIDEIRKILKKLLEADKKSIDDIRRILKKLLEIVKRLIDLLRRVRRDEEVKEVVKEVERRLRELREEVKRVVKDSEDKVKRLREDMDRVVEESERLARELREKLKKKRVPEDVLRLVEEIIKLNREVLKEVRELLEDIVRVNREVLREARELLEELARTLRKLLRDRSDDKTLKKILDELRRKVKETDDRLRKLHEDLKRKVKELIDRLERLNEDIARLLKETRD

SEQ ID NO: 13327 - protein, 240 aa, Artificial Sequence; identical to SEQ ID NO: 13326
  Synthetic

SEQ ID NO: 13328 - protein, 236 aa, Artificial Sequence
  Synthetic
KTEELLRELIKVLKETLDRLKRVLEKLAETNDKSLKELLKLLEELLKAIRDVLRRILDDKDVMRDVERRLREILERLREEIDRYREELKRLLDEVKKTLDEYEKRVREVLEEIKKRGLTDELIRKLAKENEELVREIERIIKENRDANEELLRRALEILKRLLDLLKRVLEEVVARRGRRVDEVVEELEKVARELADKLRRVLKESEDVVKRVKDELREVLDRSKKVLEELKKKRK

SEQ ID NO: 13329 - protein, 236 aa, Artificial Sequence; identical to SEQ ID NO: 13328
  Synthetic

SEQ ID NO: 13330 - protein, 241 aa, Artificial Sequence
  Synthetic
SKEELVKEIDELNKRVNDLLEELLRKSEKLHKEILELLERLLREIIKLLRRILEIVERRLEDETLKRVLEKLEETLRRLKKKVDEELKRLEDENRRLKEEMDRLLRKSREELERLREKVVRDRGREDEVLRRLLELHTEDLKHAREVLDEVLRLNKKALDLIRRILTEVLKLIKELLKLIEAGADEDELRRLLEDIERKIERLLRELKKESEEIRKRIRELLEDNRDKSRKIKKAIEELKK

SEQ ID NO: 13331 - protein, 241 aa, Artificial Sequence; identical to SEQ ID NO: 13330
  Synthetic

SEQ ID NO: 13332 - protein, 235 aa, Artificial Sequence
  Synthetic
KLEDAARIAAKAAEEWAEAHKRAAKINAEASEEWAKAHREAAKIAAEAAKRAADEARGDKDEDAKRAEDLARRAIEILEESAKRAKDAAEDDKRIAKESAERAERLARKAKELLKDLAKKKASADDAARLAKRVAEEAKRLDKEAADLSRDSARRAKELDKRALKLVRDAAREAKKAVDDEDALRVIEKAAEDAERAAKESLDVAERALRESEKAAKESLEVLERALRDAKRAAD

SEQ ID NO: 13333 - protein, 235 aa, Artificial Sequence; identical to SEQ ID NO: 13332
  Synthetic

SEQ ID NO: 13334 - protein, 242 aa, Artificial Sequence
  Synthetic
SALETAAKLAKEAADRWLEASKRAAELAKDAADKWLDASRRAAELAKKAAKEALDADKEDALERAARSLEEAAKEAIKLDEEAARRLAEAAKTAIKLDEDAARDLKRAADEAKRRLTEDRDAAREAEKLAKRAADAAKRHTDELRKLAERALRASKEHTEDLKKLADDALKAAEELKRLDDRDTDLKRRAAKAAEDIKKAADELLKKSEDAAREIKEAADKLLEDSKRAAEEIKRAADEITR

SEQ ID NO: 13335 - protein, 242 aa, Artificial Sequence; identical to SEQ ID NO: 13334
  Synthetic

SEQ ID NO: 13336 - protein, 238 aa, Artificial Sequence
  Synthetic
DEAEKLAKEAREAIKRYADASEKIAKEAREAIKKYLEASKRIAKELREALKELARRLTDRRALEAAKKAAKVVDDAAKKNEDAARRAAEVIDKAAEDNRRAAEEAARVIDEAADRARRISDKDTAAEVAARAAREAARIIEEASRISAEAAEEAAKILEDASRIAAEAAKRAADIAREALRDKDAVREADEAAERAREKLERLSREAKKAAKDAKDKLKRLSDEAKKVARRLIEELKR

SEQ ID NO: 13337 - protein, 238 aa, Artificial Sequence; identical to SEQ ID NO: 13336
  Synthetic

SEQ ID NO: 13338 - protein, 232 aa, Artificial Sequence
  Synthetic
SKDEKAIEALKRAADETRKAAEKSADAARRAAEKSEKAAREAAEALKRAVEEAARALGEENEAAREAKKAAEEAAKTIKEALERSKKAAKELIEENRKIAKRSERAARELARLLREKKEDSKEIVKKAEKAAKELEELWRRTSEEARRAAEELEKIWRELLKRLRDAAREAARRGVPEAVLRAAEKAIKAAEEAARANKKAADEAIRANEEAAEANKRAADKAIKAIRDAAR

SEQ ID NO: 13339 - protein, 232 aa, Artificial Sequence; identical to SEQ ID NO: 13338
  Synthetic

SEQ ID NO: 13340 - protein, 233 aa, Artificial Sequence
  Synthetic
DREDAARRVEKAAREIAEKNKKAARDIKELAKEAIKRTKEAAERVKRAAKRIAEAAEEGADEKTLLEEAKELAERAKRASEDLARKWEKIARDALRALEESARDVRRLAKEAKDALRRDGGIREAAEAIDRAVRKAEKTHKEAAEAIKRALEDARKANEDAARAIDDALRKLAEARDKDAVKRALEELARAAEEAARADAEAAKKLAEAAERAARANIKALRDLAKAAKDAAR

SEQ ID NO: 13341 - protein, 233 aa, Artificial Sequence; identical to SEQ ID NO: 13340
  Synthetic

SEQ ID NO: 13342 - protein, 245 aa, Artificial Sequence
  Synthetic
REEEAAREAAEAARRAAEIAIKANEEAARAAKRAAEISIKASEDAARAAEEAAKEAARSNDKNERAKKAADEVKREAERLAKENRDIARRVEEEARRILDESRRIAEEVKRRAEEILKLLRNGEPLEELAKRLIEILKRALEEDHRLARRAIDILRRALERNARLAREAIEILKKALEDAAREAQDEDALRRAKKAIEDAIKVLKEALDKSAKAIEEAIRVAKEANERSAKAIKDAIEVAERAAR

SEQ ID NO: 13343 - protein, 245 aa, Artificial Sequence; identical to SEQ ID NO: 13342
  Synthetic

SEQ ID NO: 13344 - protein, 243 aa, Artificial Sequence
  Synthetic
SEAETLVERLKRLSERDERAARRLVEELKRLAEEDKRAAEELARRLEELARRAEDVARANKDRDEAKKVVEDLEKEAEEIIRDYRRLLEELDREAEKVIEDYRRILDKLRRDAERVIEDAKRRLKDLEEAARAIKLAREAAKRAIDASKESADAAERAAKEAIKASKRSAELAEEAAREAIKALKDAAEEAAKRLRRAAEEALKINKRANEELERAAREALDLNRRANEDLEKAAEDALRTAK

SEQ ID NO: 13345 - protein, 243 aa, Artificial Sequence; identical to SEQ ID NO: 13344
  Synthetic

SEQ ID NO: 13346 - protein, 243 aa, Artificial Sequence
  Synthetic
REAEELVKRLKELAEKDRRAAKRLVEEAEKIIRRARELSKKTVKKLEDLIERAKRLADANKDRDEAKKAVEDLDKEAKEIADEHRKATDKIERDARELIKKYREILKRLEEEAKRVIDDARRRLKELEEAARAIELAEKAAREAIEASRRSAELLREAAEKAIRADREAAKLAEKAAKDLIRALKDAAEDAARRAEEAARRALKINEDAAREAERAAREALKINDEANKRLEEAARRALETAR

SEQ ID NO: 13347 - protein, 243 aa, Artificial Sequence; identical to SEQ ID NO: 13346
  Synthetic

SEQ ID NO: 13348 - protein, 240 aa, Artificial Sequence
  Synthetic
KELEEILKTVEDLVRRAKELLRRIHEINRESIEDIRRLLKEIHDTNKRSIEKVDELLKRKTSEETLERLVEEHKKLLEDLLRRLRRLVEEHEKKLDKLRKTIEKLVREVEELLRRAAERVDDERARRVLKEVLRVIREVVEILKRALELSLEVLRDVVRRIEEALRLSLEVLKRVVEVAKNKRDETEIRKILKESNDRLTEVIKEVEKVLRESDELLRDALKKIVDVLREVLKRLEDTVR

SEQ ID NO: 13349 - protein, 240 aa, Artificial Sequence; identical to SEQ ID NO: 13348
  Synthetic

SEQ ID NO: 13350 - protein, 247 aa, Artificial Sequence
  Synthetic
EKEKEIKDAEDEARKAAEESKRKIDKADEDAKKALEELERSIREADKDAKRALDEERREDRRAEEAIKKLRDLARRAKKIHRDNLEKIDEIARRLKKLIKEYIEKSEKIARELKKLIEDAARKERGSDALRLAKEALDLVDEAARRNEKAAREALETVDRAARRAKEAIKKSAEDVDRAAREAEKLARERREDAARIAAKAAKDALKANEEAARILARAAKEALKILEDATRILKEAADRALDILRK

SEQ ID NO: 13351 - protein, 247 aa, Artificial Sequence; identical to SEQ ID NO: 13350
  Synthetic

SEQ ID NO: 13352 - protein, 246 aa, Artificial Sequence
  Synthetic
SEVEEIEKVARRNLELIKRLLEKAERVAKKSLDLIKKAADDARRIAEETLKLIREAAEAGVEEKAAREALRAIEEAARRAEEAAKEALKANKEAADRAREAAKRALDATRKALEEARRLAKDRAEEAAEALARALKRTIEAAKEAVEALARAAKRSADAADRAVEALARALEEAIRAAKEASRTKEAEDLLREAAKRAEELIRRAEEAAKRLKEEWERLIRELKRALEEYAKEAKKLIKELEDRTR

SEQ ID NO: 13353 - protein, 246 aa, Artificial Sequence; identical to SEQ ID NO: 13352
  Synthetic

SEQ ID NO: 13354 - protein, 245 aa, Artificial Sequence
  Synthetic
SKREEAEKAARRAEKLAREAREAARRSLERAKDLARRHEKLSRELLEEAKRLAEEVKETAKKPTDERTAEELARKIIEALKKANEENRRSAEELIEALERNLREIEKLIRDAIEALRRAVEEARGEGKRKADELRRAAREAIEALKRALEEARKAHEEAIRAIEEALKKDSKAAKEAIDAVDEAAKRKAIDEALKALKRAADLSADANRRALEALEKAARLSARAAEEALEALRRAAELARRAAE

SEQ ID NO: 13355 - protein, 245 aa, Artificial Sequence; identical to SEQ ID NO: 13354
  Synthetic

SEQ ID NO: 13356 - protein, 237 aa, Artificial Sequence
  Synthetic
SAEDIIRESEKADKDALDEWRRLIKKLEDLIEELLKENERLIRKLEELIKKALEADKEERGSEEAKRLLEKLARAIEELEKEARDLNRRAAEAIKRLADEAKKIVEEYKKIIEEIKKKASDARDLARALDRSAEAHERAAEIAARAAKRALEAHSEAIKIAIRAAKEALDAARAAKRGEARGEEAAERAKRAADEAKKASDEAAKEAREAAERALRAAEEAAKEAEKANRDALRSAK

SEQ ID NO: 13357 - protein, 237 aa, Artificial Sequence; identical to SEQ ID NO: 13356
  Synthetic

SEQ ID NO: 13358 - protein, 251 aa, Artificial Sequence
  Synthetic
SEDEELAKEAKRAVEEAKKRLEDLLRRAEEAHRRAKKELDELARRAEEAHKKAKRDIDRDAKDDEAARALKEALDRHLEAVKKAAKALKEALDRNLDAVREAVEAAKKALDDALKAIEDASRRDRKEDAKRAAEEAAKALEEAAERAERAAEKATRALEEALKRAREASKEAAKALKEALKRARESNVEEEIVRRADELAKRAEELNRRLAEEADKIAKKAKDLNERLLREARDIARRAKELIKRLLDARR

SEQ ID NO: 13359 - protein, 251 aa, Artificial Sequence; identical to SEQ ID NO: 13358
  Synthetic

SEQ ID NO: 13360 - protein, 241 aa, Artificial Sequence
  Synthetic
SKAERVVDEARKTDEEVLREAEKVNRKVEEVIRRVLKRNEDVNREIARAIERVLRGGVEEKLVRELEKLNRDHHEKSKENIRNLEEVNKKHHEELKELADRNRRLNDKVLEDAKRDRREEEVRKLLEELKERSRDSIRKSRELLDRLREYLKRDIDRSEKVLRELEKRLRELIEKVRRKVDKEEVLRTAEEVVREALRLVTDAHRVNEEVIRDVLRLVERVHRVYEEVNRRNDELLKELTD

SEQ ID NO: 13361 - protein, 241 aa, Artificial Sequence; identical to SEQ ID NO: 13360
  Synthetic

SEQ ID NO: 13362 - protein, 232 aa, Artificial Sequence
  Synthetic
KDEERLREILKKYKEDSERILREVREILERYRRAIEEILKRLEDILRKLEEDVRRELKDNEAVKRVVEKALEAVKEVLKAIEDAVRESLKAAEDVLREIKRVSDAIIRVLEALARGERDVDEVLETARRLTEEVEKVVREVLERSERALRKVRTVVKRVLDIIRELLAEVKRAVPDLTKALKTVRDVLELLRKILEEVRRLNEKLLEELKRLLDEVVEKNERLIKLLEKDAE

SEQ ID NO: 13363 - protein, 232 aa, Artificial Sequence; identical to SEQ ID NO: 13362
  Synthetic

SEQ ID NO: 13364 - protein, 240 aa, Artificial Sequence
  Synthetic
DELETLEDVLRKIEDLLRRWLEKLEETLKRIIRLLETSLKLLEESIRRILRILERDVDDDKVVRKLEEVLRRALKEHRRVLEELLKVLRDVLEENRKVVEDLKRVLEEVIEKIARVKRREELLRVVEELLERVREVIKELLRVNDRVLREVEEVVKKLLKVNDELAKRVRTVVKELVDSREDKKVRDVLREIEELLERHKRLLEKLARELRELAKRHREEIKKVLETLKKLAEELTRRVR

SEQ ID NO: 13365 - protein, 240 aa, Artificial Sequence; identical to SEQ ID NO: 13364
  Synthetic

SEQ ID NO: 13366 - protein, 235 aa, Artificial Sequence
  Synthetic
SEKEELRRELEEHAKRSRDTVKRLEDENRRVLESLKRKVDTLRRINEETLREIRRLAREERLSKDVVRRVEEVVKESEDILRRILRRIKEIADESERILREVLKKSEEIIREVERVLREVDSEELLRRLREALKRNIEVLRELLELNKEVLDRLVEVIKELLERNERVLEKLVRETDSRDEKLKRDLEDLKRKHDELRKRLKEELDELRRKHEKIKEELDRHLKELEDKLREARR

SEQ ID NO: 13367 - protein, 235 aa, Artificial Sequence; identical to SEQ ID NO: 13366
  Synthetic

SEQ ID NO: 13368 - protein, 235 aa, Artificial Sequence
  Synthetic
SEKEKLTEILRRHERESERVVKELDEENKRHLKKSREIADTLRKLNEETLERIRELVKRARISEELVEKVERVAEKSKRILDEAVKRSEDIARESEEILRRARERSERIIREIRRVLREVDSDDLLRLLEELLRRNVEVLEDLLRRNLEVLRKNVRVLRELLKKNERVLEELVKTLNDTDETLKRELERLKEEHERLKEELDRHLKALEEKHREIRREIDEHLKELKRRLDEERR

SEQ ID NO: 13369 - protein, 235 aa, Artificial Sequence; identical to SEQ ID NO: 13368
  Synthetic

SEQ ID NO: 13370 - protein, 252 aa, Artificial Sequence
  Synthetic
SEKEKLIEDLRRILKETEERLKRVKERLRELLDEYRRRSEDKLRELKKELEEEEEKIRRSGLSEEAERAVRKLLKVLREVLDKLKKLNEDNLRVLEEVLRLLERLLDELLKVLRELLRELEKLAEDKQDKDEVLEDIKRRIAEVIDRAKKLLDKLRELIEESIKRVRTETDRLRKDIEKVLRDIAEDVKDDRLRKRIKETADRLREMLKRHRELLERSMELLRRALEEAKKVLDETEETARRLLKLAEDEER

SEQ ID NO: 13371 - protein, 252 aa, Artificial Sequence; identical to SEQ ID NO: 13370
  Synthetic

SEQ ID NO: 13372 - protein, 246 aa, Artificial Sequence
  Synthetic
KEIEETLKELEDLNREMVETNRRVLEETRRLNKETVDRVKATLDELRKMLKKLVDDVRKEPTSEELKRLLRELEELLRRVVRRVEELLKKSTDLLERAVKDSKDALRRSHEVLKEVAKRVKRAKDENLPREEVLRLLRELLERHAKVLKDIVRVSEKLLREHLKVLREIVEVLEELLERILKVILDTTGRDKKVEELEKALEEIKRRLKEVIDRYEDELRKLRKEYKEKIDKYERKLEEIERRERT

SEQ ID NO: 13373 - protein, 246 aa, Artificial Sequence; identical to SEQ ID NO: 13372
  Synthetic

SEQ ID NO: 13374 - protein, 237 aa, Artificial Sequence
  Synthetic
SEEEDREREYEERHKKAEEDLRRAEEEYARELRREEERLKEEAKRLEKELRDARTKLDEDEIADKIAKALREIAELLKRLVKVIRDVLRENEKLLRDIAEVLRRISRENAKLLRDAREKQRAGEIVEALRESNKRILDALREVVKALKKTNEDVLRTVKEVVKRIEELLRRLASEGNDEKAKKALDEAVKRVKEDIKRLEDSVKTADDKDRKAIRRAEETVRTHIRTNEEAVRREEK

SEQ ID NO: 13375 - protein, 237 aa, Artificial Sequence; identical to SEQ ID NO: 13374
  Synthetic

SEQ ID NO: 13376 - protein, 235 aa, Artificial Sequence
  Synthetic
SELEETLKRLKETNKRLLKKVKELVDESLRLNEELLRRLREVIRKIKETIKEVLEEGVDEKDIRKAEEILDDVLRKLEKLVRDSVRVNETVLKEVEDIIRRSLTELDKVAERLKEAKSEKVVKDVLKEVIDRNEEIVEELLERIRRVLEDDLRIVKEILDILRKVLKEILKVLEEIVDEDERVDELRKRIRKTEEEIEDIKRRYEKRVRELKETLDRIVKELRDRYKKIREEIDT

SEQ ID NO: 13377 - protein, 235 aa, Artificial Sequence; identical to SEQ ID NO: 13376
  Synthetic

SEQ ID NO: 13378 - protein, 239 aa, Artificial Sequence
  Synthetic
DIEDVLKKVLEKNLRVLREVHEVNKRVLDEIVKLLRELHRVNKRVLEIILRLLEALRRGERDREEVLRELERVVKESKEVNKEVLKRLEDIVRESLREIERVLDETRKAIKEVEKVLRERRVEERVLEMLRRYADRSRDFADKDKKKNKETLDELRKLSEDDKRINDRLVETLRRIIAQGDTSDEDLKRIEDELRRTLEEHRKRLREVERELEKKVEEHERELRKYEEETKRLLREAER

SEQ ID NO: 13379 - protein, 239 aa, Artificial Sequence; identical to SEQ ID NO: 13378
  Synthetic

SEQ ID NO: 13380 - protein, 236 aa, Artificial Sequence
  Synthetic
REEERLRELITDYKRKLDDLKRRSEDLLREYEKTLEDIRRESERTKKELRESLKRDLDREGESEKVKVLKEVEDLLDKVNKRLLEIIKTNLDLLRRVNEELERVLKTNLDLIRKVLELARRGAPEKDVKRVADEVSERAEKLLRDVEKRNREVSKRLEDLLREIKERNDEVVERVKERTDDEKVKRELEKHTKLLKEILDTVRDLNRKHSEEIRRTVEEVRKANRRLLEELKETRK

SEQ ID NO: 13381 - protein, 236 aa, Artificial Sequence; identical to SEQ ID NO: 13380
  Synthetic

SEQ ID NO: 13382 - protein, 241 aa, Artificial Sequence
  Synthetic
SELEETLKKIKELAEISRKLADETRREIKKLIDDSRKLLEDTHRTNEEMVRRVETKAKDKDERIKEVLKRVAKEIKDSNDELRRRVEESAKRLREVLEELKEKIERSIKRLEDILDLLRRGEVREEEVVRELLKVLADNLRAIEEVLRKLLRILEDNLRVTEEVLRTNLRLLKKLLDELKLDEEKLREVRELLERYREDVRRLKKEYEELLREEDKKVKKKKEDYERILRKTKKELDERRK

SEQ ID NO: 13383 - protein, 241 aa, Artificial Sequence; identical to SEQ ID NO: 13382
  Synthetic

SEQ ID NO: 13384 - protein, 234 aa, Artificial Sequence
  Synthetic
SEDEKAAEDLKKLAEESIRELEKALRDAARLHEEALKRLKKALDEAARLAERAIEEARKGLDLRRVADEVAKAAEKAARAIEEVLREVLRASNEAAKAWKRVAKRNAEAAEEAARRRRDKTAEDLLREARKAAEDSKKEADDLNREAEELARRAREEAERLLREAEKAARDAKTKKLVGEELIKLIEDLLRLAAELAKKIAELAERHLRLLEEAARKHIELVERLIELAKRDTD

SEQ ID NO: 13385 - protein, 234 aa, Artificial Sequence; identical to SEQ ID NO: 13384
  Synthetic

SEQ ID NO: 13386 - protein, 234 aa, Artificial Sequence
  Synthetic
SEDEELEKLLEEAKKLIEESSRRLDELLEEDRRVVKRIEEEVEKLLKEVKEEIDKIKKEVRELEKIKRVLDALVDVARKIVEVTKELLRDNVRVAERIVEVIKDVNRKLVDVVDKLRKTKDKRELEEILRELERENRRVSKEVEDLLRELRKRNEDVLRRIEKLLRELKKEVDELLKDLGKVLEIVKEIIDRIRKLLKKTFDISDELLRKWEDLLRRNNDLSRRLLKEAEDKAR

SEQ ID NO: 13387 - protein, 234 aa, Artificial Sequence; identical to SEQ ID NO: 13386
  Synthetic

SEQ ID NO: 13388 - protein, 235 aa, Artificial Sequence
  Synthetic
SEKEDLARKLRKLVEELTREYEELVKKLERLIEEIEKVSEESVRKLEKLLREISEEVRKLGTDSRVLKRLLERLRRIIEEDHELNTELLKRLLDLLKEILDTSRELLKRLLDILREVVRDESVLRDLERTLREVLEENERAIEEAERVLRKVLEDSERAVRDARRVLKEVDKSPTKDELLRKLVELLVEVLRRLIRVNRELVKLLREVLERLLRILRESVKKLKRLIEKVIKDET

SEQ ID NO: 13389 - protein, 235 aa, Artificial Sequence; identical to SEQ ID NO: 13388
  Synthetic

SEQ ID NO: 13390 - protein, 242 aa, Artificial Sequence
  Synthetic
KEEEDLLERVKRVLDELIEIVDRNHELNRRVVETSARLVERLLEEVERALETLEREIPNRKLLDKAIKDLRDVLRRVKEKVKRSIEELKEVLEESRRVLEEVVRKLREVIDRVRRLVEKGVDLRDLIRELKRVLEEAVKLIERLVRLNTRAAEKDNESLRELVRAIKEALKRAVDMVRADGLDSRLVKKLDEIVKEVAKKLEDVVRRNEELWRKLVELNKESVRRLREIVERVARDLEETAR

SEQ ID NO: 13391 - protein, 242 aa, Artificial Sequence; identical to SEQ ID NO: 13390
  Synthetic

SEQ ID NO: 13392 - protein, 232 aa, Artificial Sequence
  Synthetic
RRTEEVIKKIAKLIDELIETLKKIVEDSAKLIKELIDLLEEIIKRSADLIRELEKVSKRGDRDRLKKLIDRMRRETERALEELRRVIEELKERTERALKTIEDLIREIEEAIRRELEDEDLAREILEVIRRILELLREDMELNLRALEEILRLLEEVIKLNKDAIDEILELLKKSEERRIAERIRELLRESKKLVRDVVEEAKRLLKENRDSTRKIIEDIRRLLRKIEDSTR

SEQ ID NO: 13393 - protein, 232 aa, Artificial Sequence; identical to SEQ ID NO: 13392
  Synthetic

SEQ ID NO: 13394 - protein, 242 aa, Artificial Sequence
  Synthetic
DKEDIIRRLARVLERHDEANREVVKEHDEVLEEHLDVHRRVVRSNIEVLRTLLELVEKLDSEDLKRVLDEVRKRLEKSLEELERRLRESDKKSETVIRKNEKAVRESAEALKDVIRKLKEARDDEKVKETAKKVRELLERLIELNRRWVEALRRLNERLNKLNRDAIELSRRLLKELEDLTREGVPEKDIRKVIEDIERLHRESMEEVRKLVEEIKRLNKEVLKRSEELVEEAKRLLKEVAD

SEQ ID NO: 13395 - protein, 242 aa, Artificial Sequence; identical to SEQ ID NO: 13394
  Synthetic

SEQ ID NO: 13396 - protein, 247 aa, Artificial Sequence
  Synthetic
DTKEVIEKLIRVLERAVKLLRELVDRDNRSLKKAVDLHREVVRKIIEVLEEAVRLLATVKEDEKLKRVLEEVVKELERVLKESEELVRTVIRDNREVVKDARELVREVERELKKVIDDARRRTDDEELRKLLEEIKKVLDDLRKLLDTNIKISEKVLRDWERLNRELAKILKDVIRKLEELARKMRDEEKLLREVERLVRELAKRLRESLKTVEDLVRELADTNRRSVKTVEDIVRDLERKAREVTR

SEQ ID NO: 13397 - protein, 247 aa, Artificial Sequence; identical to SEQ ID NO: 13396
  Synthetic

SEQ ID NO: 13398 - protein, 248 aa, Artificial Sequence
  Synthetic
SKRELLERVIREAERVLKEWEDLLRELTETSDRVIRDVERLLRELLRKAEEVIKDILRKSDDEELRKLLKRVRELLKELADILKRLVDEHRRLVEENIRIVRTAIELVKELLKRLADLLESGLPREDLTREVEKVLRELEEIVKKVKRDSERIVEDNRRLSEELRRLVEEILERLRRLVDDLIKKKDKDEDLKRVLERLTRVAEEILELLEEVLKKSNRSLEKAVEANAEALDRLIEVLRELLDDLRK

SEQ ID NO: 13399 - protein, 248 aa, Artificial Sequence; identical to SEQ ID NO: 13398
  Synthetic

SEQ ID NO: 13400 - protein, 248 aa, Artificial Sequence
  Synthetic
SKEELLKKVEDEARKVLEEWKEEVKRLIEESKRVLDDWRRLVDEVSKDIKRVIDEARKDSEDKDLEEVADRVRKLLEDNKRIVDEAIRRHEELLDENRKIVERVIELLEELLDEIAKLTRSGKPEEELIRRAEELVRRLAEIVERVIRESRRIVEDNRRISREVVERSKEIVDRLRKIVTELIKKKDKDEDLKRVLEKLIKVIEKIVRLNEEALRKSNESLERIVKLNEEALRELIRVIERLVELVRK

SEQ ID NO: 13401 - protein, 248 aa, Artificial Sequence; identical to SEQ ID NO: 13400
  Synthetic

SEQ ID NO: 13402 - protein, 230 aa, Artificial Sequence
  Synthetic
KEREEIDELVKELEKELRRLVRENEKLVEDNERTLKRLLEENKRLVEELVKRLRDGLDRDELKKVLDDALDANRKSVRRLEESAEEVLKTNRRSLERAIDLLRRALEEIADKVDKRDLLEEIERLIRELIRRLERVHEEIERLIRRSIEELRRIHEEVEKLIEDVKRVADRVDKDEVVEIVIRVLEEILRLSEEALRIHIRVTREVLRLSKELIDEIRKVLREIADRIRK

SEQ ID NO: 13403 - protein, 230 aa, Artificial Sequence; identical to SEQ ID NO: 13402
  Synthetic

SEQ ID NO: 13404 - protein, 245 aa, Artificial Sequence
  Synthetic
SKEELLKELLDRVRRVLTEIKKLLERLLRRSKEVIDDSERLVREVLKRVEDLAREIKAERSVDDRAVDRMLELVERWVELWKRVLELLEEISRRIVRLIERVLELLLKVVEEVLKRLTEVRTEKELKDVLDTVEELLKRVLDELRKVVEEIRELHREVLEANEEVMDRVEKLLKEVRDTLRRRLKDKDALDKLRRLIDELARLLREVHERDKELIRDHLREVEEIAKEIARLIKRLAEEIREITT

SEQ ID NO: 13405 - protein, 245 aa, Artificial Sequence; identical to SEQ ID NO: 13404
  Synthetic

SEQ ID NO: 13406 - protein, 245 aa, Artificial Sequence
  Synthetic
SERELAKRALERAKEAAEESKRLAKELLDRSRELAKRSKELADEVLKRAKKAAEEIKKKRSADDRAAEEALRAAAEWARLWKEVAELLLEASRRAAELWKEVAEEALRAAEEVARLLEEARTEEELKKAAEDAERLAREVLKANEDALREARRLHREVLEANDRAAEEARRLAEEVRRELDKRAEDKDAAREARKLLKDLLELAERAHKKDRDAIEEHLRLAEEASKRDKELLKELLDLIREIAR

SEQ ID NO: 13407 - protein, 245 aa, Artificial Sequence; identical to SEQ ID NO: 13406
  Synthetic

SEQ ID NO: 13408 - protein, 231 aa, Artificial Sequence
  Synthetic
SKEEEVEKVLRKWEEILRRLIEENKRANDKIRREYEELVKEIRRVLEEIKEVAERLRVSEEVKRILEKLIKLLEDILEYEKENVERLIELNERILRELKKSVEELKKLVTRVRRDKLPESEVRKLVEDVLRKNEELLKEAKKAWRDSIENLKRVLEEVKKLVKTVLREIEEKIDDKDVVRKLIEVIERLLRVAEEVIRRILKVNTELMRVDERSIRESLKAIREVLKVLDT

SEQ ID NO: 13409 - protein, 231 aa, Artificial Sequence; identical to SEQ ID NO: 13408
  Synthetic

SEQ ID NO: 13410 - protein, 245 aa, Artificial Sequence
  Synthetic
SKEELVDTVKKKLEEVLKKIDKLSRDVKEKLRRVIEELRKLSREVHETNREVARRLREEAALEEIVKLLEESAKRATKLLRDVVRRIKEVAKEASELLEELVREIARVLDEVVKLLAEAGVPEELVRDLERLVREAVRELERLVEEHKRLVEEAAKRLEKLVEEHKKISEDVARRLRELLEKISDEETVLRTLEKIIRDHNKAHKRVTDAVAKILEELIKLHDEVSRRLKDILRRLLELLDEVTR

SEQ ID NO: 13411 - protein, 245 aa, Artificial Sequence; identical to SEQ ID NO: 13410
  Synthetic

SEQ ID NO: 13412 - protein, 245 aa, Artificial Sequence
  Synthetic
RKEELVDTVKKDLERVIETVRKLSEDVKEKIRRVLEDIDRLSKEVHETNKRVVEELEDKKSLEEIVKLLEESAKRASRLLKELVRELKEVLKEASDLLREIVERVERVLKKIVDLLRESGTPEELVRTLEELVRRVVERLKKLVDDHEKLVKEIAEKLEKLVEEHERISRRVVEELRELLRKISDEETVLRELVKLIRDHNRMHEEVVRRLKKIIEEALKLHDEVSRRVAELLREVIELLDRVAK

SEQ ID NO: 13413 - protein, 245 aa, Artificial Sequence; identical to SEQ ID NO: 13412
  Synthetic

SEQ ID NO: 13414 - protein, 245 aa, Artificial Sequence
  Synthetic
DKEREVDEILRRVTKLLKELEKRSKEILDRVRELVREYKRKVEEILKRVEDLIRRLIKDKKEVEEIETVLKKILDVVRTIVELLKESLDEAVKVVEDISRVNRESLDRIRKVVEEIVEVIKKVRTKEELKEVIDRIAKKLDEVLKRNEEVIRRVARRLEEVHEKNRRAIEKAVRDLRKVLKELEERGVSLDELRKILKELEELLRTLNKELKEVVKELRELLKELHDRLREILEELKRLLEEIAR

SEQ ID NO: 13415 - protein, 245 aa, Artificial Sequence; identical to SEQ ID NO: 13414
  Synthetic

SEQ ID NO: 13416 - protein, 245 aa, Artificial Sequence
  Synthetic
DEDELIRKLLEDLKDIVRKILELIERDLRDIERVVRRIVKVIRDDLKKIKEVVDDIRRRVPRTEELERVIKRIEELLRTSEEELDRILKEIEELLRESRRRLEEVVKAVEELLRRVEEIVDKGRERKEDVIKLLREVVDDILRLVEEVVRTNLEIIKRILELIERVIRLNLKIIRDILRLLEETVDSELADRIRKLIEDLERHTKKVLEDVKRAITELRKNSKDILEEVRKLIDELRKRIKEVED

SEQ ID NO: 13417 - protein, 245 aa, Artificial Sequence; identical to SEQ ID NO: 13416
  Synthetic

SEQ ID NO: 13418 - protein, 232 aa, Artificial Sequence
  Synthetic
KAEEIAKIAVDAVRKIAELLRRASKINLDAIRKAAKLSKEASKINLDAIRKIAEEVKDAEEIKRDAERIAREDAEAAKRSAELAEEIAKRDEDLARRLEEEAKRLADEIRAEKATEEAAEKALRAIDELLKRAKRASEESARLAEEWIKEDKRLSEESAKLIEDLIRKAEKKNRVDRKALEKARKLAEDALRANKRANDEAKKLADEALKENRKALEDAKRLARKAAEDAKR

SEQ ID NO: 13419 - protein, 232 aa, Artificial Sequence; identical to SEQ ID NO: 13418
  Synthetic

SEQ ID NO: 13420 - protein, 246 aa, Artificial Sequence
  Synthetic
SEEELLRRIRELLKKALEDNKDVLREIEELLRKVTEDNDRVLEEIRKLLEEVDEVVKRAGVDEELLKLIEDILRTEKRVLEDWKRLVEETRKAVEDLLRELERLSREVVERVERLLDELRRRNDEDVVRKIAREVEKIVDTHRKVVDDIRRKVEEIVKKHEELLRDIERKVEEIVRRLKEILERVDKDELRRVVEKIEKVLRDVVRALRELVRINARVLEEILRLIEELVRRNAEVLKRILELVAT

SEQ ID NO: 13421 - protein, 246 aa, Artificial Sequence; identical to SEQ ID NO: 13420
  Synthetic

SEQ ID NO: 13422 - protein, 238 aa, Artificial Sequence
  Synthetic
SKEDELRKAEEDARRVVEEILDLNRESVEKSRRVAERVLRLNEDSVRKSRDVVRRIKEEVNTDDKLLDILEKVLRTNERLSERDLRLIKTILELNERLSERDRRLIKKILEDVRRLVELVRRGTREEELEELVRELIRRIEDILRESEELVRDTIKKIEDILKESEDLVRRTIEEIERKVDDRDVVRKLIEANEDHLRVNKEIVDRLIKANEEHLEVNRRAVEKLIEVLKRLLDVARK

SEQ ID NO: 13423 - protein, 238 aa, Artificial Sequence; identical to SEQ ID NO: 13422
  Synthetic

SEQ ID NO: 13424 - protein, 237 aa, Artificial Sequence
  Synthetic
SEKEDLVRTIEEVVKTIEELVERHERKIDEIVKRSRELVRTHVEKIEEIVRRVEELVRRGGSRDEELRRRILDLVEKLFKHVEEVLKTILKLSEELLKHVTEVLERIRDIIRRLAEKLRRNNVKRESLEKVLEKAKRVLDDVKKKLEDSADENRDVLRRVKEELERSLDKLRKILKSNSDLDTLAEEVKRVLKEHVDLVRKAARLDSETLKKHVDLVRTAAERVSEVMKELVELVRR

SEQ ID NO: 13425 - protein, 237 aa, Artificial Sequence; identical to SEQ ID NO: 13424
  Synthetic

SEQ ID NO: 13426 - protein, 237 aa, Artificial Sequence
  Synthetic
SEIEELVKDIERIVREIKKLIDDHVRKLEKIIEDIERDMRRHEETVREVVRKIEDEVRRGGSRAEEIKRRILEEIERLVEHVKDLLRRILELIERLAENIRRLLRRIEEIVTELVERLRRLNVKRESLEKVKKKAEDIIRRVKKELEDSLEELKDILRDAKRRLDESLKEIREILKSNSDLDSLAKKVSDVARKHLDLARRVIKLISEALKKHIRLVEKAMEDISRILEDLVRLVRK

SEQ ID NO: 13427 - protein, 237 aa, Artificial Sequence; identical to SEQ ID NO: 13426
  Synthetic

SEQ ID NO: 13428 - protein, 236 aa, Artificial Sequence
  Synthetic
SKLEDAVRRIEEILRHIVRSLEEVVKDIEKILRDHVRMLREVVKRIEDVLRRVVELLRRAGDQRELVRELEELVRELVERLRRIVKRNEDLVRDLLDKLRKIVKRNEKVARELVERLRRRGESKEEAVELLREALRLNKKSVEDIERLLKELLDLAEESVEEIERLLRDILKKIADVITDKDVLREVAERIRKVIERLKELLDRSRERAEDVIKKLRDLLKENERLIEEVRRRLEK

SEQ ID NO: 13429 - protein, 236 aa, Artificial Sequence; identical to SEQ ID NO: 13428
  Synthetic

SEQ ID NO: 13430 - protein, 228 aa, Artificial Sequence
  Synthetic
SREEAVADVIRRLEEILEKNLRLLEEIIRRLLRILEHNLRLNEKAVEIIEDLIRKLLRDEKVIREAKKTVEEILRESKRVLDEVKKKLEKILRDLERVHEKVMRDIREILKRNKGKERALETLRRVVEELVRVTEEVAERLKEVVKEVVEANRRVLEKLKKLIEELAEKVVKSRLADDLRRVVKKIVEDLEENLERIKDIIRRLVEELERSLEEIRRLIDRLVKEIRR

SEQ ID NO: 13431 - protein, 228 aa, Artificial Sequence; identical to SEQ ID NO: 13430
  Synthetic

SEQ ID NO: 13432 - protein, 234 aa, Artificial Sequence
  Synthetic
SEEEAAREAERLLEEAARVAERIVRDSERLLDEAAEVARKAVEDSKKLLEDALRAAREGQPRDAIREAAKELEKESKRLAEEIKDAARRLKEETDRLLEEAKRAAEELKKEADRLATEGAAAEDAARALKEAADLLVKVAEDLARANKEAADLLVEVAEKLNRANKEAAELLKKLADDREAAERVARRAERANEEALKEAEEVIKRAKEANKRALEEAKRVIDRADKALKEARK

SEQ ID NO: 13433 - protein, 234 aa, Artificial Sequence; identical to SEQ ID NO: 13432
  Synthetic

SEQ ID NO: 13434 - protein, 247 aa, Artificial Sequence
  Synthetic
RDRDVLRKVKREIEELVRRIEKVSRDALKEVKRLLDENRKIAEDVLRLIERLLRKIRDTRNDDRVVKETEEVLRDNHRLLEELIRRLIKVLEEWLRRHKKLLDEIRELLKEILRLVKESGVSEDLLRRLKRVIEELDKKLKESEEKLRRVVEKAKEDLKRVLEEHRKVLEDLKRALEEVREKLRERDREEVVEELLRMLKRVAEEMKRVHDDLSRAVEKVVRDVVRVDKELLDELRRILRRLEEVIT

SEQ ID NO: 13435 - protein, 247 aa, Artificial Sequence; identical to SEQ ID NO: 13434
  Synthetic

SEQ ID NO: 13436 - protein, 231 aa, Artificial Sequence
  Synthetic
SKDEELMRLLEELVERWRKIVEDLERDHRRLVKEIRELVERIRKKLEELVDRIRKNGIDERIVRLIEEIAKIIEEVLKEIVKLVERAVRENVRVLRESVRLVAELVETLARLLRGADERVTEAIKKVLDTSEDLIRRVIKVNEDILREIAKLVEEVLREAERILTEIKKEVDREEIRRILEELKRIVDDVLRIIARILKLLRDLTRRLAEVAKKVHKLLEELLRKLKEDTR

SEQ ID NO: 13437 - protein, 231 aa, Artificial Sequence; identical to SEQ ID NO: 13436
  Synthetic

SEQ ID NO: 13438 - protein, 234 aa, Artificial Sequence
  Synthetic
KDAETLEKVLRDVLERADEIIKRLEDIYREIKKRLEAIIKEAEDINRKILEEIRRLAEDRKALADVVRKVAEDNLRLNRRIAEVLRELVKRALDVNEELARVLEELLKRLLEIVESANVDELRDIVDKVLKTVKKLLDESRRVAERLKREVERLLKESEDIVKEILERVEELARKITDVKRALEELKDLIDRNLKVLKDLLDATRKLIEENIRVLREILKRIKDIARELLEATK

SEQ ID NO: 13439 - protein, 234 aa, Artificial Sequence; identical to SEQ ID NO: 13438
  Synthetic

SEQ ID NO: 13440 - protein, 242 aa, Artificial Sequence
  Synthetic
SSKEEVLELIKELVRSSKEVLERVVRLNEKSLRISVEVLDRIVELIEEIVRIVVRELEKKVDERLVRKLKKVLEEAKERVERLVKENRDLIREVEEKSKRLVDENKKVLDEVVKEIDEVAKGELDSEEAVRRLLKILDETLRRHKEIVERLLKVNKDLLDRHREILERLKRLLEETLKRVKDTVPEIRELLKEIKRIIEEIDRLVKESLKRHKDINDEIRELAKRTLDEIKEVIDRIRERLR

SEQ ID NO: 13441 - protein, 242 aa, Artificial Sequence; identical to SEQ ID NO: 13440
  Synthetic

SEQ ID NO: 13442 - protein, 234 aa, Artificial Sequence
  Synthetic
SEEEDVIRDVKRRLEEILKTNADVIRDIEEILKEVKERNKRVVEELKDILRKVLEELRKKGVEERVLRLIEELVKKIEEILKRHLKLVEELLRLLREVLKRHLTLLEELVKLAKEVLDARLPKDELKKLLDRLLEEVRRVSDEVRRILEELLKRVEEVVRESKELLKRLLEEVEKLGVGKEVVDLIREIVERLARAVEESLKLLKEIIDLLTESSKELVKLLEEILRTLKEAAR

SEQ ID NO: 13443 - protein, 234 aa, Artificial Sequence; identical to SEQ ID NO: 13442
  Synthetic

SEQ ID NO: 13444 - protein, 235 aa, Artificial Sequence
  Synthetic
SDEERLEKVVKDVIEKVRRILEKWKKDIDKVVKELRRILEEWEKIIREVLDKVRRLKDEVDMLVKVLEEILRLAKELSKRVEEVLREILKLAKRLSDELVKVLREIVKRARDITRDDKLRKIVEDVKRELEDLARKDRKILDDVRELLERIAKEDKDILREAEETLRRLADEMRRTTVDERLLKRVVDILKRLLELNATTIERLLRILEELLKLNKELAERVIRVLEKLLEEIKR

SEQ ID NO: 13445 - protein, 235 aa, Artificial Sequence; identical to SEQ ID NO: 13444
  Synthetic

SEQ ID NO: 13446 - protein, 235 aa, Artificial Sequence
  Synthetic
KDMERVLTEHKKAVKELIELLERLLEEHERASRELIKLLRELLERHKRATDELIKLLRENKRRDEEIVRRVEEITKRVRKIVTEIVERAREITEKIKRIVEEIAKRVREVTKRLEDELKSEKAKKVVDLSREVVKIIEKVLDELVKLSKEVVDIITRVLEELVRLSEEVVRIITELLRRVEEVVKRLEDVNRTLEEIIRKVEEEAKRVNEDLRKRIEDVVRTLEEVNKRLKEITK

SEQ ID NO: 13447 - protein, 235 aa, Artificial Sequence; identical to SEQ ID NO: 13446
  Synthetic

SEQ ID NO: 13448 - protein, 240 aa, Artificial Sequence
  Synthetic
SELEEVAELLKRSKELIDEVEERIRRLATESLRFLDEVVRRIRELLTRLLKEVRDSGVPDELIELIERVIRLIEKVLEDIKRLIEKNIELAERVLEAIKRLVEEDIKLLIEVLRRKEEGRPEKDVKELLKRVEESVKRSLTEIRKLLEEVRKSVERTLEEVKKLAEDVLRLVEEVLKRAKDRGVDERLLKKTEDVVREILRLIEEVLRTHAEIIREILELIERLLELHKTLVDRLLERIE

SEQ ID NO: 13449 - protein, 240 aa, Artificial Sequence; identical to SEQ ID NO: 13448
  Synthetic

SEQ ID NO: 13450 - protein, 235 aa, Artificial Sequence
  Synthetic
SVLETVKRLAEESSERIRKIVEDDKRVADDSSRKIKELIEEIKRRVKELLDRIKDLDSTEDLEKLLDELLKEVKRLLEELLDAHRKWSDDSRRLLERVLRTHKELIDRLIKLLRDAGKPEEVVRRLEKVLRESLRRVKEVIKELIDLNKETLDRLKKIVEDLERVLREVLTELRRKRDKKEVVIRLIEELVKLLEDVLRRLLEVNETLVELNKRVWDRLVRINEELAEVALRVAT

SEQ ID NO: 13451 - protein, 235 aa, Artificial Sequence; identical to SEQ ID NO: 13450
  Synthetic

SEQ ID NO: 13452 - protein, 235 aa, Artificial Sequence
  Synthetic
SVLETVKKLLEDSSEKIERIVEEDERVAKESSDRIRRLVEEDKRVADEILDLIEKITDTDTLLKLVEEWSRTSKKLLDDVLKLHKDWSDDSRRLLEEILRVHEELIRRVKEILDREGKPEEVVRELEKVLKESLDTLEEIIRRLDEANRRTVKRVKDVIRELEDINRKVLEEIERKRDDKDAVIKVIEKLIRANKRVWDALLKINEDLVRVNKTVWKELLRVNEKLARDLERVVK

SEQ ID NO: 13453 - protein, 235 aa, Artificial Sequence; identical to SEQ ID NO: 13452
  Synthetic

SEQ ID NO: 13454 - protein, 251 aa, Artificial Sequence
  Synthetic
SIRELLKELEDVVREIIRDIRRLLEESRRVVERIERETKRLLDEIRDVARRIEETIRRLPLPEEVVKDVLDMIRRLVKEIEEVVRLHLELVREVLESHEKSVRDVEELIRRLVEVVREVVRKLEESRDKDTLKKLVEDIKRILEKILRDIERLNKENARLIERVTEELRRAADRVRKIAEDILRRIEKAGLKKEAVDELRRLLEELKKIVEDILRTLEKLNRELLEIDKRVADRLRELLRTLKKLIEEAAT

SEQ ID NO: 13455 - protein, 251 aa, Artificial Sequence; identical to SEQ ID NO: 13454
  Synthetic

SEQ ID NO: 13456 - protein, 230 aa, Artificial Sequence
  Synthetic
SKEEAIKELLKKHKRITEDIIRMARELDREHEEITREIAERLRRLLKKLLDDVRREVKDERLLREVKKILDEIEKILREALRRTKEILDETKKILDRALKETDEVLERIKELVERGEPKEEVLDAVRRLVELDKKAVDDWNRVNRDLVRVDKEVLKTLLDVIRELIKVLKARTDDERAKRVLDKILDDVRRLVEEAAKLLDESVKKSTDIVRRVRKLLDDSLKEVAELAK

SEQ ID NO: 13457 - protein, 230 aa, Artificial Sequence; identical to SEQ ID NO: 13456
  Synthetic

SEQ ID NO: 13458 - protein, 230 aa, Artificial Sequence
  Synthetic
KKEDDVRRLLKEHEDITREIIKLIRDLARKHLELNKRVIRALEKVLKDLEDEVRKDVRDKDLLRKIKELIKKVEKILRKALKDSKDLLKRLEDILRRALEETKKVLEEIERLLKEGRPREEILEVVKKLVELDKRALDEILEVVTDIVRVDAEAIETALRLIEEIIRELKANTTDERVRRVLDRVVERVAELVREWKELLKRSLDEVREVVKRARDMLRRSVKTVKELVD

SEQ ID NO: 13459 - protein, 230 aa, Artificial Sequence; identical to SEQ ID NO: 13458
  Synthetic

SEQ ID NO: 13460 - protein, 241 aa, Artificial Sequence
  Synthetic
DEVEDARKKLEDLERENRKVIKEIEDALRELVKDHDRVVEELRRRLRRLLEELKKLVDDRKRREETEERLRRLLEALKKLLKELIDKHREIAERMLELARRAIKISREIIEKVREILRRAGVPEDVVREIDKVVRDSLKRLEEVLKRIEEELRRSLKRLKEVLEEIKRKAEELEDILKKIKDEEMLKRVVDVLEDLVRTIEKVLRELSETLRELVRRLLELLRENNESVRRLIRILEEALR

SEQ ID NO: 13461 - protein, 241 aa, Artificial Sequence; identical to SEQ ID NO: 13460
  Synthetic

SEQ ID NO: 13462 - protein, 240 aa, Artificial Sequence
  Synthetic
SEDEAAERLLREAKKILKRLEDAARESLKSAERILEELEKAARDSLRKAEKIIRDAKRKGLDEKALKRAKEALEKAERDHRRALKRAREAIEEAAKRHKEALEEAERAIKRAEEEARKAKKESDERTAAKRLLDAVKELADAAKKAADRALKANEDLARAAKEAADEALEANKRLAKALRDDTTDKEAEKLATKLVEDSERAAREAKKLADENVKRSKEAAEEAKRLADRLVKEAEDDAR

SEQ ID NO: 13463 - protein, 240 aa, Artificial Sequence; identical to SEQ ID NO: 13462
  Synthetic

SEQ ID NO: 13464 - protein, 244 aa, Artificial Sequence
  Synthetic
SEDEELLKRLDELLKEILKVIEELIRRLEKAHKENMDKIRDSARRLRELLRKLAEDEREPTSEETKKRLVDELKELVRRSVEELRRSVEDLKRLVDEVRELLERLLRKLEKLVREIARELEKRSRSDELEKKVEELIRVAETVVKLVADVVRLLIEVAERAVELNREVVKEHEEILETVVELLARGGREELVKEILERVDRLLRKSLERLREVLEESRRRLEEVLRALEEVIKRVRDLLRKLRE

SEQ ID NO: 13465 - protein, 244 aa, Artificial Sequence; identical to SEQ ID NO: 13464
  Synthetic

SEQ ID NO: 13466 - protein, 238 aa, Artificial Sequence
  Synthetic
RKKEELARVLEESLEVNRKLVRDLAEVLRKDLEIIRELVKRLVEILKKILKVLADVIRKEELRRALKEAEEVLRKLIRTLEEVVRRHEEILRKLIEDLKRVVKRWEEVVDRLIKEIEDLEDVLRKLLEVVRRSVRELEKILERLKRSVEEVIKRITEVLEELEKLVRDLIDVLRRAGLDEETLRKVVEDLERLLREARRVVKEAVEKSRRSLEDLRRIIEEAIRRNEKILRKLKEIVK

SEQ ID NO: 13467 - protein, 238 aa, Artificial Sequence; identical to SEQ ID NO: 13466
  Synthetic

SEQ ID NO: 13468 - protein, 244 aa, Artificial Sequence
  Synthetic
KEDELLRRIKEVIDKTLEDMKRLLKKHKELLDEILRLLAELVEENKKLIDEILKLVEDSGIDEKALDELRRVVEEVKEEHKRILEEVARAIKRNKEKVDRVKERVEKVAKEVKDKLDELKRDSDKDKVVREIDRVLKELVDVIRELVKELIDSAKESVDVLRKVVEDSERVLRKLVDVLRRVLDSEEAKELVRRLKRAVEESKKKLDELVKDVKRLADDSARDLRELVKRIAELVKKIRDELRD

SEQ ID NO: 13469 - protein, 244 aa, Artificial Sequence; identical to SEQ ID NO: 13468
  Synthetic

SEQ ID NO: 13470 - protein, 244 aa, Artificial Sequence
  Synthetic
DAEEALKRAREVLKEAADLNRKAVEDARKILKDAADDNKRALEEAERVLRKALEDAKDARARNEDERKALKLLADAAKRIAKLIEDASRATADALRKIAEVIKRASELLARAAKEIARLAREAAERADDEDLRRIAEELAKRLEKLAKEHKDIADRIAEELKRLAREHNEIAKELARRAEELAKKARNAEKAAEDAKRLLEEAEEASKKLIKAAEELLRELAKASKRALDEARKLIEEAEKAAR

SEQ ID NO: 13471 - protein, 244 aa, Artificial Sequence; identical to SEQ ID NO: 13470
  Synthetic

SEQ ID NO: 13472 - protein, 244 aa, Artificial Sequence
  Synthetic
SEREDLLRLIEEVIRELIKLLETNLRLNEETIRTLIRLIKKDLDLNRRSVEELVKLLKERVRDEEKLRKVLEDLERILRKIEKVNRDVIEKLKEILKELRKIHERVIRELERILEELARVVEKLDSEDLARVILDILRKAADVLREVLERSERVTDKIAEVVEEVLRLNREMVREIIEVLKKVLDSEAADEVRKKLAEDERLNDKSLEELKRILDKDREINRRVAEKLTRILETLRKIIEDVAR

SEQ ID NO: 13473 - protein, 244 aa, Artificial Sequence; identical to SEQ ID NO: 13472
  Synthetic

SEQ ID NO: 13474 - protein, 241 aa, Artificial Sequence
  Synthetic
DDLERVLDELRRIIEEIKRRIDKILEDYERVLRDAKRLIDDVLREYRRIIEELKDLLDKVRSEEAVRRIIEVLKKLNEVSRKLVEAIIKVLRELSEISERMVRLAEELLERLVEVLAKGGLPEEVIKTLKKVVEELVRRLREVVKRDRELVRKVEKVLREAVERDKRIVDRIARLLERDGVDKDVLERIKRLLDELRRANEEVVRRVKKILDESLKENRDVVRELKKILDELLEIVAEAAR

SEQ ID NO: 13475 - protein, 241 aa, Artificial Sequence; identical to SEQ ID NO: 13474
  Synthetic

SEQ ID NO: 13476 - protein, 238 aa, Artificial Sequence
  Synthetic
SKKERLKKLIKEHLDLLRRLLKELEDLIRKHLELLRRLLRRLKELLRELLKLIEELVSDEKVLRDIRRVVERVLEELDRVVDRSEKVVREVIERLRDALRKNTEVVKTVIEKLDKIEDEDTALKVLEEVVKESVRLVEEALDIAVTVVKESVDLVRRLLDSLLAVAKELVDLLREVLRKADLRDRVEKEVRRALEKVERLIREIKRLVERSLEEVEKLIREIKKRVRDSLRKVKKESE

SEQ ID NO: 13477 - protein, 238 aa, Artificial Sequence; identical to SEQ ID NO: 13476
  Synthetic

SEQ ID NO: 13478 - protein, 242 aa, Artificial Sequence
  Synthetic
DEIETVLKRLAELIKESLDLLRETLDELRKIIEESKKSLEDVLRRLKELIDRLRRLAEEKTGEELLRLLIEVIERLLKVVEDLLRESNRVVERLIRVNREALRLSNRVVADLLKVLKDAAPDVEELRKLAEDVLRENRELSRESVKIAEKMLEENRDLTRRLKELAKKVLEEIRDLVRRVRDKDELLRRVEEILKRLLELIRRIIEEHRKILERLLETHEDLIRKHEEILRRLLKAADEERQ

SEQ ID NO: 13479 - protein, 242 aa, Artificial Sequence; identical to SEQ ID NO: 13478
  Synthetic

SEQ ID NO: 13480 - protein, 238 aa, Artificial Sequence
  Synthetic
SEKEDVLRRVEEIARRVRDILRRNLEKVERIAEELKKINDDLLKEIERIIKELKEVLRDVKDKDLVERLLRVLAELVDVLREVVKRSVEVLEKLIRVNEEVIERLREVLRELVEVLARGGVPREIIETLRRLVERLVKILEKNKEDLKRLVDENRDLAKKVLEILKELIKRLRDVLRERKEAIEEVLEILDRILKTARDVSKENLESLKRALELDRRTNERLEDLLREILELLRKDIQ

SEQ ID NO: 13481 - protein, 238 aa, Artificial Sequence; identical to SEQ ID NO: 13480
  Synthetic

SEQ ID NO: 13482 - protein, 246 aa, Artificial Sequence
  Synthetic
SELEELRKLAEEAIEAAKRALDRLHKLSRELIEAAKEILKRLKKLSEDLIRAAEEAARRSESEKALEDAKRAIDELRRATERVEKRVREAIKELEEANKRVAERARKAIEELKEAVRRVEERARRGETKEAAEEALKAVRDAAKAAREAAEDHLRALKKAAKAAEEAAEEHLRALERAARAAEEALRGEDAKRAKEIAKEAIERSKKIADEAREIAKRAIDKSKKIAEEAKKIADEVLKRAEDIAR

SEQ ID NO: 13483 - protein, 246 aa, Artificial Sequence; identical to SEQ ID NO: 13482
  Synthetic

SEQ ID NO: 13484 - protein, 250 aa, Artificial Sequence
  Synthetic
RESEELIRLLRKIIELLEELVERIRDLLRKHLKLLEEVVELLKRNLDEILRLLEEVLREANVEDAKKVLTDVADLARKSLERIKKVLEDSRRLAEEVERAVEEVLERVKRLVEELEETVERLKDGRKEEVLKVAKDILDKIVELVERLLRVVIEVVKKSIDLLERLLEEHERVVTEIIKLVKRLLEKAVKDTEKAKKLEELLRDLLRTVREIVKEVRELLEESLRTAEKLVEDIKRELDELRKRLKELVD

SEQ ID NO: 13485 - protein, 250 aa, Artificial Sequence; identical to SEQ ID NO: 13484
  Synthetic

SEQ ID NO: 13486 - protein, 239 aa, Artificial Sequence
  Synthetic
DEERLVEEIIRTIKRVIELNEESLREIERVLEEVIKMDKRSLEEIKRVLDEILKLARDGDVSERLVERVERLVRRLIRKNEEIVRRVREKVERLIRKNRTLVDDVRRKVKELIEKLRRTGLKEDLERVLRKILELLERLSEDTARVLEELLRLLEELSRRTAEVLKRLLDILRELAKLRGEELERVLRELKKVLEELIKDNERVNDELRRVLEKLKERNRKVLEDIKRVLEELRDEVER

SEQ ID NO: 13487 - protein, 239 aa, Artificial Sequence; identical to SEQ ID NO: 13486
  Synthetic

SEQ ID NO: 13488 - protein, 241 aa, Artificial Sequence
  Synthetic
SSEEIIRTLEKAIRESEEKLERLVRRDEEVVKDLRTKLRENLDRVRRMVEELVRMLESGKPAEDILREAERLSKENIETLEEILKKAERVSEESIRVLEEILKENEEVVRKIIKDLPKTEKADEVVERLKELLKRSEDVIRKVVEDSERLLDRLRRVIEDVVRRSRELLTKLREVVKRVRDKDTLVKVLKEVLERHVEADEKAVRELAKVLEENVRLLEELVRVNKEVLRRILELVKELAK

SEQ ID NO: 13489 - protein, 241 aa, Artificial Sequence; identical to SEQ ID NO: 13488
  Synthetic

SEQ ID NO: 13490 - protein, 233 aa, Artificial Sequence
  Synthetic
SKEEKLKDDVRRVLEDLDRVLKELEKLSEDNLRELKRVLDRITDLHRRILDELRKKITEEELLRRVEKVLKDNLDLLRKLVEEHKESSERDLKRVEDLVREIKEVLRKLLELEDRDTDIRKIEEEIERLLRKIRKAVEESKDLNRRNSERIEEVMRRSEELARRLLKEIRERIDSKVAEDILRVLEKLVKVSREAIKLILELSEHHVRVSTRIARLLLDVARKLFEVIKEAER

SEQ ID NO: 13491 - protein, 233 aa, Artificial Sequence; identical to SEQ ID NO: 13490
  Synthetic

SEQ ID NO: 13492 - protein, 233 aa, Artificial Sequence
  Synthetic
KKEDELEKMVRDVLEDLDRILREAEELSRKNNDDLRRVLDRLRRLAEEVIKRLEEKVTIRELLEELKRVIRELLRRVKELVEEHHRSSREDNRLLKELVERIKKVLEELLRLVRNDTDRREIKKLLDELKRLIEEVARESRELNKKNSERIREVVERLERLVEKLLEDVARTIDSEVARVILEILKRLLKALKEAAEELKKISEHHLRVSEKVVRDLDRVVKKIVDVARRVAT

SEQ ID NO: 13493 - protein, 233 aa, Artificial Sequence; identical to SEQ ID NO: 13492
  Synthetic

SEQ ID NO: 13494 - protein, 242 aa, Artificial Sequence
  Synthetic
SEKEKLLRDLEEVVRDVIRLSKESVDKLKETVDRLVEESRRTVEELRRIVDRVAKEVKSKEVLDKTRDIVRKVEELNERIIRAIEDLVRKVEKLNEEVIRAIEEVVRRMAELIRDKREDKERVDRVVKELADELRRVLEKYEKILRDLARELKKLVDEHRRVVRELAEELRKILKELKDKRGDDEIVKLLEDVVRELVEVLRKSTEVIERAVKKLVDILRESLKLIEDVVRRLVEIMEEIVR

SEQ ID NO: 13495 - protein, 242 aa, Artificial Sequence; identical to SEQ ID NO: 13494
  Synthetic

SEQ ID NO: 13496 - protein, 238 aa, Artificial Sequence
  Synthetic
SEIEDVIRRLRKILEDLERVSEKLLREIKKILDEARRLNEEVIKEIKRVLEDAVRVFRDIRERKEELRKLVEELIRELRKLAKEVDEIHKRIVERLKKLVEDAERIHRKIVETLEEIVRRVPREELKRVVEAIVEVIKEHLKVLKDVIRRIIKAIEENAETIKRVLEDIVRVLELVLRGEKRIEDLVREVERLIKRIEDSLRELEKTVRELLKRIKEASDKVREDVDRLIKELKEAAD

SEQ ID NO: 13497 - protein, 238 aa, Artificial Sequence; identical to SEQ ID NO: 13496
  Synthetic

SEQ ID NO: 13498 - protein, 246 aa, Artificial Sequence
  Synthetic
SREEIVATLEDLARKILEVVKKLAKEIEDAWREIERKVREILKRLEELWREIEDVVRKKVDSRVAEILETVVKRVVDITRRLIEEAERVVRELVDITRKLITILEEVVRRLVEIVREASKIDDRRELEDMLRKIREVVREVIERLKKLDEDVRRVVEEVIRRLEELNKRLEDVIREVKKRLEELELERELVKELVELLEEILERNTRVIKEIIDLLRTVIRIHEKIVEDLIKLLEELLRRLEEATR

SEQ ID NO: 13499 - protein, 246 aa, Artificial Sequence; identical to SEQ ID NO: 13498
  Synthetic

SEQ ID NO: 13500 - protein, 237 aa, Artificial Sequence
  Synthetic
KEKEDALKKLEDLARKSREDLERVLRKHKKILDKIEELLKRVLDEHKKIVDDILRKTGTESEILKELARLLREHHEALRRLIEELRRLLEEHHKILEDLAREHKRLLDELIKVVADGVDKDELERIIKELRERDKKLVDDLRKVSEDLLDAVRKLVEDLERISRELLRRVEELAKDIEEELAREVERVIKELLDKSKEILERIERAIDELLKVSEEILKLSEDASEELLKILREFAK

SEQ ID NO: 13501 - protein, 237 aa, Artificial Sequence; identical to SEQ ID NO: 13500
  Synthetic

SEQ ID NO: 13502 - protein, 237 aa, Artificial Sequence
  Synthetic
DEKEEALKTVERIIRDIVRRLRELLKEHEDIVREIERELKEVHEKHKRLVEKALEELGTEDDILRKVEELLRRHNEILEEVIRRVRELLRRHHEVLERIVERLRELMKRLLDVIRRGEPEDELRKILRELLETVKRIAEELRRLSKRLLDEIRRLAKELEDVSRDLERRVRELLKDLEDRLADLIRRAVDRLRDISREILKRLVEVIERLLEVSEKILKLVEEVIRELLRVVEEAAK

SEQ ID NO: 13503 - protein, 237 aa, Artificial Sequence; identical to SEQ ID NO: 13502
  Synthetic

SEQ ID NO: 13504 - protein, 251 aa, Artificial Sequence
  Synthetic
SVVEILAEVLKRLLDILRKLVDAIRDVVKKHVEVVEKLVRLHEEVLRRLVDILRKIAEVREGEAVKRLLEEARRVLEDILRKSKKINEESERIIEEVIERIEEILRRIEEKLKEILDEIRRAGIPESKKRIVDELVKLVREILKELKKVVDDWAEIVRRLDEESKRLNEEALKIVEDLLRKLEDLERKPVDEEILRRLVEEAKRLVAESIKKLRDLVRKIREAHKEAIKRLEEIVRKVEEIVRKVIDELRK

SEQ ID NO: 13505 - protein, 251 aa, Artificial Sequence; identical to SEQ ID NO: 13504
  Synthetic

SEQ ID NO: 13506 - protein, 248 aa, Artificial Sequence
  Synthetic
SDEEKLRRLLEEVRRLAKRVIDELERVLRESKRLAEENIEELDKALEEVKRLIDDVIKKLRDGARIEEVVEEIRRVLKRVVELLRRVSDDTRRILERNVELLERIVEKLERVLRRVVRVLEDVTREERLKELVRRVEELLKEVLRRVREIVKRLADLHRKVLKESEDLVRKVEEIAKDIVDKLRTTTDSETIERLLRELLKVLKEIVDRHRRIIERLLKASEDAVRELKKLIEETLRVLTDVVRRTET

SEQ ID NO: 13507 - protein, 248 aa, Artificial Sequence; identical to SEQ ID NO: 13506
  Synthetic

SEQ ID NO: 13508 - protein, 235 aa, Artificial Sequence
  Synthetic
SLVDELRKSLERNVRVSEEVARRLKEALKRWVDVVRKVVEDLIRLNEDVVRVVEKVTVDESAIERVRRIIEELNRKLDAVLKKNEDLVRRLTELLDKLLEENRRLVEELDEDLKRRGGTEEVIDTILELIERSIERLKRLLDELLRIVREALKDNKRVADENLKKLKEILDELRKDGVEDEELKRVLEKAADLHRRLKDRHRKLLEDLERIIRELKKKLDEVVEENKRSVDELKR

SEQ ID NO: 13509 - protein, 235 aa, Artificial Sequence; identical to SEQ ID NO: 13508
  Synthetic

SEQ ID NO: 13510 - protein, 229 aa, Artificial Sequence
  Synthetic
SKEERLREVAEKHKKDLEDIVKRVDEAAKETKRRLEEILKRLEEVLKKILDDLEKGPDDEKLKKVKKILKDIMDRLRELIKKILKLLKENLEKIKELLRRNLEISEELLKLAKDLRDRDVLETVRRVLEKLDEEWDRVLEDSRRIIETILRELDTLLREVEKLIKEIKDEIKDLKEVLDILERAVEVVRRVIKALKEVLERHVDATREVIERVKRVNKRLLEAVREVVT

SEQ ID NO: 13511 - protein, 229 aa, Artificial Sequence; identical to SEQ ID NO: 13510
  Synthetic

SEQ ID NO: 13512 - protein, 232 aa, Artificial Sequence
  Synthetic
SREEKLEELIKELERRLKDVLDRSRELNREIRKTTEEVIREVDRLLREIEKIVRDVRLPREIVELIDRLIKRLREILKEHKELVDEVIRRNEKSNRELVKLLEEALREARREGADEKLIRVAEELLKRIEEIIRRNEEIIKDLKRRSKRLLEEARRVVKDLLRRLEELLRRLDEDTARLVREVAELIEKVVREIVKLIDEDLKKLERVVRENARLLREVVELLLKVVRDVAK

SEQ ID NO: 13513 - protein, 232 aa, Artificial Sequence; identical to SEQ ID NO: 13512
  Synthetic

SEQ ID NO: 13514 - protein, 244 aa, Artificial Sequence
  Synthetic
DEKELLEEIIKKVEDLLRESRELWERLIKRVKELLKRSKETVDEILKRIKELLDELRKVAAEGAPEEELVKKIKEILETVKRLIEEHIRTNEEVLKEILELLKRIIERNRKVLEDVLKDVTDTGVPEEVLKELKKVIDDLERLNEEVLKEATEVLKRLLDINARVLEELDRVVRELEDLLRRLTDKRLLDVIKEIVEKLIEVVRKLLEADKRIIEELIRVLEKIAEVDETIVKRLIEVLKKIAD

SEQ ID NO: 13515 - protein, 244 aa, Artificial Sequence; identical to SEQ ID NO: 13514
  Synthetic

SEQ ID NO: 13516 - protein, 244 aa, Artificial Sequence
  Synthetic
SEEEDIERVLRELKKLHKDHLDLLREVVKRAEELLRRHLEILREVLKREKKLLKDVLRDARRREEAEEVVRRVEKELDRVLEDSERVLRELLERLKKVLEEIKRVHERVTRDLERVLRELRDVRSEEVAKLLTELLERSIRVIEESVRLSRRALEVLIRVIKESVDRLEELLRDLIRVLKELRDKGVITDELLEEAKKLVKEVRELAEETLRRLARLVEDVKRLNDEAVKRLRELVRRIKEEVR

SEQ ID NO: 13517 - protein, 244 aa, Artificial Sequence; identical to SEQ ID NO: 13516
  Synthetic

SEQ ID NO: 13518 - protein, 237 aa, Artificial Sequence
  Synthetic
RTEEILREIVDLLRRVAEENLRTLEELVELLDRVARRNLESLRELVRILEEVLKKLLKKDKDEELKRVIDEIKKVLEELIETLKRVIDESREVLKEIRKTLEKVIRETKKELERLIELLRRGVPVERLMEELKRLLDRHKDVIRKLNELLKRLLERHVKVVRDLNRALKALAEKIREDIRDEDVLRELDEVVRRVIERDREILRELKRLVEEVIRKNEDIVRKLEEAVERVLRKLKD

SEQ ID NO: 13519 - protein, 237 aa, Artificial Sequence; identical to SEQ ID NO: 13518
  Synthetic

SEQ ID NO: 13520 - protein, 239 aa, Artificial Sequence
  Synthetic
SEKEEVIKDLRKVLEEVLRRHEELVERLKEVLRKVLEDHKKLVEDLKRVLDEVRRKLENNADLETVIKELLEVIRRVLEDSNRVVEELVRAVEEVLKESIRVVKRLIDTVDELLRRLTRTEDVKEIVDRIRKKLKELLDTNRELVERVRKLLEELVETNRRLTEEVKRKVEEILKLARNGLDREELLRRLERIVEDIIRLLEESLKLAAEVIKTIIRLLEESLERLKRLVDDIVEKLRK

SEQ ID NO: 13521 - protein, 239 aa, Artificial Sequence; identical to SEQ ID NO: 13520
  Synthetic

SEQ ID NO: 13522 - protein, 243 aa, Artificial Sequence
  Synthetic
SEKELLERLEEVERRLLEIVRRLLKRNRDVHEELLRIVEANLRRNKKVHEDLLEKVRKSVRKEEVKKVIDEVDKKSKESLEELKRVIEEVKRLSEETLKKVEKVIKEVEEELRRVLDEARRNPDKDVLKKAIEVARRIIEELARVLKDDIDRLRELIKTLADVLKKDIDELRRLIKRLMEEERVDKVVKELEDIVEELMEENKDSLRRLKEIVEELLEENRRVLEKLRKIVEDVARELEETAT

SEQ ID NO: 13523 - protein, 243 aa, Artificial Sequence; identical to SEQ ID NO: 13522
  Synthetic

SEQ ID NO: 13524 - protein, 234 aa, Artificial Sequence
  Synthetic
SIEEVLREIVKLLREVLERLIRVDERLVEALKRVAEKNIEVLRRAVDALRKVLELLRRGQDKRDVDRELRRVLDEVKKEIERSIEELKRVLEEHRRRIRKIIEELKRVLEEARRKLKSERLLEKLTRLVEKTIRAIEKLHREWERILREHIRLLEELLKRLKELLDELRKLIEDGEDEETVIRRVEDVLRDLLRRLEEVVRRSTEEAKRLLKESRDVVRDVEKTLRELLEELRR

SEQ ID NO: 13525 - protein, 234 aa, Artificial Sequence; identical to SEQ ID NO: 13524
  Synthetic

SEQ ID NO: 13526 - protein, 234 aa, Artificial Sequence
  Synthetic
SVEEVIRKAVTDLDRVLKTNIRVDERLIEMLKRVADENREVLEKIVRLLKEVLDLLRNGRDERDVAKRLREVLEEARRDIERSIRKLEEVLRRHREAIKRSIDELREVLERLERKLRSEDVLRKLEEILREHEDMLRKLHEEWERILRRHIELLKRLLEKIKRLLEELLRLATEGEDEKEVVDKVKRVLDELRRDLERVVEESEKLARDLLRKSRDVVRRTRELLKKLLEEVET

SEQ ID NO: 13527 - protein, 234 aa, Artificial Sequence; identical to SEQ ID NO: 13526
  Synthetic

SEQ ID NO: 13528 - protein, 247 aa, Artificial Sequence
  Synthetic
SRRETLEKLLKEIEDLIRESLERLEKLLEENRTLIDDDERRVRELARDIKELIKEIEERLRRENVEEALKVVREVLRIADEAIKLHIEASRRVLELSRRLVEDHKRATKEVLELLRELIRRLIEVEERKEDKREVKKDVERILREIEERLEEVLRRNREIHEEIKEDLKRVSKEVRDLLREIKKTLEDGKVSEEILKIIEELIKRLEKLNEDSNELMKELVKRNERLARENLKLVEELLRRIEETTR

SEQ ID NO: 13529 - protein, 247 aa, Artificial Sequence; identical to SEQ ID NO: 13528
  Synthetic

SEQ ID NO: 13530 - protein, 234 aa, Artificial Sequence
  Synthetic
SEVERLRELVERWREELKKLLDELRKVVEEIARELKKINDELRKLVEDIAREARRETKKRELLKELLTRLIKLLEEANERVRDLLRRLLEIIDEILRRLRELSKRLIEEARRETREERVKRALEEVVRTSEEILRELKEILDRVREELKRINDDSRRIIKEVVDRLREILEKADKDDDERVIEELIRVLRKVVEDHADVTRRLVEVLRKVVKLIEEVLKKDEKVLRDIVDRLKT

SEQ ID NO: 13531 - protein, 234 aa, Artificial Sequence; identical to SEQ ID NO: 13530
  Synthetic

SEQ ID NO: 13532 - protein, 237 aa, Artificial Sequence
  Synthetic
SEVEEVVRVLEKVLRLLRRLVEELHRLSERVLELITRLLKELKDLSREVIKRLEDANIDDRVREKLKRVHEKLERVVEEVLRRIRTVNEDLKRVVKKLEEKIKKVIDELRRENASEEALRKVAKVIRDVVEEAKDVVRRHVEVVRDVIRLLEEAIESHVRVVRRLIEELLRKLAEERKKEKIDELRRVLERVEREHRRVIKKIRDVVEKVKRDHERVLREVEKVVREVRTELEKLRE

SEQ ID NO: 13533 - protein, 237 aa, Artificial Sequence; identical to SEQ ID NO: 13532
  Synthetic

SEQ ID NO: 13534 - protein, 253 aa, Artificial Sequence
  Synthetic
SVEEELRELVKRVEKLVERLRRIVKEIIERSRDLVRKSREVVDRLKKELDELVKEVVREEGEDSEVVEVIEKLVRLATRALELHIKSLEKHVKLNEEALRRLIEVIEELVKLIREVVKELLRITRRGEPEEELKRIVDRAKEEVKRVLKKLREILEEWKKKIRESLKENKTIVDKVKRDIERVLEELEEAKVASDEVIRRIAEVVKRLIDKLKELSDDNRKAVEDHERLVRKAIEELVREVEDILRRIDETAR

SEQ ID NO: 13535 - protein, 253 aa, Artificial Sequence; identical to SEQ ID NO: 13534
  Synthetic

SEQ ID NO: 13536 - protein, 241 aa, Artificial Sequence
  Synthetic
SEKELLKEILDRIRELLEDDNRLLKRIVDEIRKLLEEWLRVHKEILERIKELLDRINAPEDVIRELTRALKETEEDVDRVIRTLEKLLKEVLDRHEEVVRKLDRLLKEVERLVEERDAEEVVRDLLRVVKEILDESKRVIDELARVVDEILKLLEEVDRKLAKVVKEILEDVLRAKKDDEDMVRKIRKIIEELKRLLEDLRRDTRRVIEEAKRLLKEWRDRNKEVADTLKKLLEDLIRKIR

SEQ ID NO: 13537 - protein, 241 aa, Artificial Sequence; identical to SEQ ID NO: 13536
  Synthetic

SEQ ID NO: 13538 - protein, 242 aa, Artificial Sequence
  Synthetic
REDEIVEDWRRLLEEAKRRSEEVAKEIRDRAREVTKESKRVADEWRRLLEEVKKRAENIDERVLKLIDDNIRDVERIIRRHEEIVKTLIRLLEEILDRHRRLVERNIESVDRLLKAVKNGEPIEELVRRIEDLSRKLVETNRKLSEELKRMAKKLLDENRKLSEELVKRSRDVVKEIEDGGLGEELVRVARDLVRLNEEVLRKSNRSVEELLKALARVLDRSNKSLEDLVELNKRVLDKLRT

SEQ ID NO: 13539 - protein, 242 aa, Artificial Sequence; identical to SEQ ID NO: 13538
  Synthetic

SEQ ID NO: 13540 - protein, 242 aa, Artificial Sequence
  Synthetic
RKEDLVREWRELLRKILEDLEDLVRKWRKLLKKILDDLRELVRRVREELDKALRTVEKGELDAEEVLKELERLVEEIIRAVRELLKRLSDLNKKVLDELRRLVERLSKLNKEVLDKIREEERSRKIEEILRELEELNRRSLKKLEKILKELDEADKRSLKEVEDVLEELKRRIREILELMKAGKDLRDLVRKIIEIIEDILRLLEEVLRKNVKAVEEVLRLAIRVLEENIEAVEKVLEDVRR

SEQ ID NO: 13541 - protein, 242 aa, Artificial Sequence; identical to SEQ ID NO: 13540
  Synthetic

SEQ ID NO: 13542 - protein, 243 aa, Artificial Sequence
  Synthetic
SEEELLREIEKILDEVRKLVEKLLEDNRRLADELIKLIKELLDRNLRLIERLLELLERGTDADELVKEARRMLEESKRLVTELVKTVEDVLRKSERLVEELERRVRELLKRLKDLVRETGGDKLKKVIEDLERVLKELLDALREVVKRSVKVWRDLLRALDDVVRRSVEVVEELLRVVKETGPGEELREVLERALRKAKKIHEDLKRIVEDVRRRNDEILKDLERVLKEVEDKIRKILDELRK

SEQ ID NO: 13543 - protein, 243 aa, Artificial Sequence; identical to SEQ ID NO: 13542
  Synthetic

SEQ ID NO: 13544 - protein, 235 aa, Artificial Sequence
  Synthetic
RDEDIKRELVRLVEEILRTSARLLDESIKSNKKTLDDIERVAREIVREIEELLKRIADGNKLDEEVLRRLVEKIRRAIEEVERLLERLKEKIKRSIDDLKRVLEETARRLEDVLDKVRKDEDKDRVVERLIKVIREVLELDKRLSEENLKVLKEVLDLVETVAKRLIDVLKEVADDIKDADELKKDIRDVLERVKRIAEELRELVERDIREDKRLLDELAKLWRDLLKMIEDLRR

SEQ ID NO: 13545 - protein, 235 aa, Artificial Sequence; identical to SEQ ID NO: 13544
  Synthetic

SEQ ID NO: 13546 - protein, 248 aa, Artificial Sequence
  Synthetic
SEDELLEKIVRKLREAVKRIEEELRKSKREIERLVKEIKEKLEDSLRRVKETLDRIRETRKKPQDEEVLERLVRTLEELLRRHLKLIEDIARELKKLLKEHLDRIETIVRDLKRLLKEILDELERTGLPREVLEKVRELVKTVARLLDEVLKNNKKLLDDLKKELDDVLKNNKRIVDELRRLLERVRRRKEDLEELLRLLKEVIERSIESLERLLELILRVLEYSVRSLEELLRRLLEVIKRIVDTTK

SEQ ID NO: 13547 - protein, 248 aa, Artificial Sequence; identical to SEQ ID NO: 13546
  Synthetic

SEQ ID NO: 13548 - protein, 237 aa, Artificial Sequence
  Synthetic
DEDEIAEELKRLLREVEEKSKEIVRRMRELAREANKKSEDILRTLEKLLEELRRRVEENRRSSKAVLDKIREVLETLKELLDRHHETVRDLVRRLKELLDRHNETVKKLVEDIKRLLDESGGRREIKKRLEDALREHNRIIKEIKKLLDKVLKDHKDILDDIKKKLDDVLREVTEILKRNRIDEVVRRIERVIREVIKILARANKRLHDVVEEIIRLLEEVTDELRRVVEEVIRRTK

SEQ ID NO: 13549 - protein, 237 aa, Artificial Sequence; identical to SEQ ID NO: 13548
  Synthetic

SEQ ID NO: 13550 - protein, 238 aa, Artificial Sequence
  Synthetic
DKEEEVRRLIEENLKKIEEVIRELEKIIRDNLRKLEEVVREIEEELETTLRLIETDGVSEEVLREVLKRVEDIMRKLRDVLREVRELHEDVLRKVEEVLKDVKRLHEEVLKKLEDGLDLTKVLEELRRINDKLLKKVKRVLELLEEINRRALELVREVVERLLRVIERLIDLLRRSGVDEDLLRKLKELLETLKRRIDEIEKKLEEILKETKDLIRRLLEKLKRIDEELRKTLEDLRR

SEQ ID NO: 13551 - protein, 238 aa, Artificial Sequence; identical to SEQ ID NO: 13550
  Synthetic

SEQ ID NO: 13552 - protein, 242 aa, Artificial Sequence
  Synthetic
DDIDEILRRLREEIEDARRKLEKILRELRERIKDYKRKTDELLKESRKRIREAEDRVRRDGARDELMRKLSKEDEELTERLVRTHEKALEDLTRAVERLLRLLKELLERLKRILEEIRKRGRVPEELVKRLREVLKEVERRVEEALKRVKDVLDKSKRDLEEAVKRNREVNKKLRDEVEKRRDDKVLEALLEKLLRSNEELVKIDRDLLRDLLRVLEELIKTVRDLLRELLRVLEEVAREIK

SEQ ID NO: 13553 - protein, 242 aa, Artificial Sequence; identical to SEQ ID NO: 13552
  Synthetic

SEQ ID NO: 13554 - protein, 242 aa, Artificial Sequence
  Synthetic
REEETLRDIERLLRKLLEELKRTADELIDSHRKLIKKLKEILDRLRRSHEKLIETLRRRLTDEEVLKEIIEVNKKVLDDVTRILEEIERLNKRAIDRVKEILKRIEDTLRKVLDDVRKDKDKDRVLDKILDVLRKVVELLKRVLDESARVVEEVLTLVKEVLERSLEAVEESLRIVERRLSDKEDVKRELREVVKEHKEDLDRIKKELKELLDRHTETLKRIVKKLRDLLEEIRKALEDLKK

SEQ ID NO: 13555 - protein, 242 aa, Artificial Sequence; identical to SEQ ID NO: 13554
  Synthetic

SEQ ID NO: 13556 - protein, 232 aa, Artificial Sequence
  Synthetic
DEERVVEEAIRVLKEVLDLHRELIKRSIDVLKESLKVHERAVESLERVLKEILDLVRRGKREELDRVIRRVMEDLKRVHEELREIHEEVIRRLDEVHRRLKKVIDRLKTRLREELRIEKRLRDAEEILDRLYRENERVLRTLKKLHRDHYETNRRALETLLRLLEETEKLDKSGTKEEEVAERVKRIIEEVRKLAEDSRRKTEELIRRVKELAERTDETVRRVIEELRRRTK

SEQ ID NO: 13557 - protein, 232 aa, Artificial Sequence; identical to SEQ ID NO: 13556
  Synthetic

SEQ ID NO: 13558 - protein, 232 aa, Artificial Sequence
  Synthetic
DEEDVARKLIEVLKELLKLVEDLIRTNIRVLEESLELHRRLIEEIEKVLKRILELLEEGRREELERVARELLKELDRVHEELKRVHEEVIRDTDRVLKEIEEVVRRVLKELREEVRIEEKLRDMERILRKILEDIRRLVKRLKKLHEDHYRTNEEVLRETKKILKRTLELVRSGTDREELAKEVKRVIEELKKLARESAEESKRIIRTIEELLREARKRAREVIEELKERTR

SEQ ID NO: 13559 - protein, 232 aa, Artificial Sequence; identical to SEQ ID NO: 13558
  Synthetic

SEQ ID NO: 13560 - protein, 237 aa, Artificial Sequence
  Synthetic
DAEEVLRLLAEVLERIIELIKKVNEILIRVLREVIRLIEEVNELVREVLKRIIELIRRDIDDEDVRRLVERIKTVAEELHKEVRKLVKEIEDLARKSNEDVRKLVKDIRRVVEELKRANLRKDRLAEAVEDLLRRILEAIKRHLRKAEEIIKRILEAIREHLKKLRELAKEIKDAARKAGVDERILEEIERLVREVEEIHERVLRRLKELLKKVREVHEEVLRRIERLAERVREALK

SEQ ID NO: 13561 - protein, 237 aa, Artificial Sequence; identical to SEQ ID NO: 13560
  Synthetic

SEQ ID NO: 13562 - protein, 239 aa, Artificial Sequence
  Synthetic
SVREELEKVIREVIEEVERVLERIRDELRKSLERLKEVIKRIEDVHRDLIRRIREIKDLEKVLRLVLDVLKKVSDLTRELLRENLEVLEKIAKLLEDLARSLLKVIRRLLEILIREFKDDEELLRRLKELVDKIRKILRDLLERVKEVVDRHRKKLEELLKRDEDLLEEVKRRLDDIRRENVPIEEVLKTVEDISRRHRELLKRILDTSKRSIEETLKLAREILETLKRLLKELLDAAK

SEQ ID NO: 13563 - protein, 239 aa, Artificial Sequence; identical to SEQ ID NO: 13562
  Synthetic

SEQ ID NO: 13564 - protein, 240 aa, Artificial Sequence
  Synthetic
DAEDEARRVIDEAVDRLRKAVEEIAEVARRHLEEVEEVVRKLEEIIRESLERVRRASEAREDRALEKIATELRKLNEDVRRELERAAEESRRKLEELRRRLDKVVKDLRELLKRLRDSGDVAGEVLEALKRVIDTVVRLLEEVLRRLAEISEEVLKLLREVLEKHHDVTRKVVDLLRKVRRDKEAEEVVRRVERLHEDVLRRLKEVVKRVKELHEEILDRLREILDRVRELARKVREDLR

SEQ ID NO: 13565 - protein, 240 aa, Artificial Sequence; identical to SEQ ID NO: 13564
  Synthetic

SEQ ID NO: 13566 - protein, 233 aa, Artificial Sequence
  Synthetic
SEKERLSKIAEDLIRRLEEELERVERTHERLLRKLEELLKKIEKEYRDAMRKLETLTGVSERTLEELVKELIDISRKIVKRLEETVTELREINDRLVKRIEDLIRKLIEDLTREVEKKEVLERISRELEEVIKRLRKVVDESRRKIEEVLEELRRAAEESTRALEEVLKELKRGKDIKEVLDDLKRVLERDLRAIKKIVKELKRILKENLDVLREIVERIKRVLEKILREVEK

SEQ ID NO: 13567 - protein, 233 aa, Artificial Sequence; identical to SEQ ID NO: 13566
  Synthetic

SEQ ID NO: 13568 - protein, 248 aa, Artificial Sequence
  Synthetic
SREERLERVLERVKRAIDRYRDMLRRLLKTVEDLIRKYEEDLKRLLKEAKELIDKVKEENKDVEEVKRVLEKLLKVLEDLVRKVRKSAEDLREIVKKLVTDVERSLELLLKIVTELVEAAKRTETKEALDKVLTEAKKKVDEVLERSRKVLEDVRKELEEVLKHSEKVLREAKKELEKIIKEVEDAGTDEEIKKIIDRLREEIERILDELRRLNEELVETLRRVLETLRELNERLVKLLRDLLREEKK

SEQ ID NO: 13569 - protein, 248 aa, Artificial Sequence; identical to SEQ ID NO: 13568
  Synthetic

SEQ ID NO: 13570 - protein, 246 aa, Artificial Sequence
  Synthetic
DEEEKMKKIEDVARRYKEEVKRVLDDLERLLRESEEEVERIVRKLEKLARDLEERVRELTKKEVVERLVRELLKAIKELIDVLRDVVRLSAEVIKELLDVLRELVELNLRAIKEIIEVLKKLKSEEVKKRLDEILEKIEKVNTDVNRRLKEIIRKLREIHEEVLRELDKILRDIERVVRDVERRIDDKEVIDALKELLKVLEDLLREIKEALTRNLEKIDELLKLLHELSRRVIEELRKLLEDLKR

SEQ ID NO: 13571 - protein, 246 aa, Artificial Sequence; identical to SEQ ID NO: 13570
  Synthetic

SEQ ID NO: 13572 - protein, 241 aa, Artificial Sequence
  Synthetic
REDEELARKAKEVLKETEDLLRKLEEEVKRVLEEIKRMNREVREKVKEVIKELRKRLKDLREVLKELEELLEELLRSDTEVSRLLEEIVTRVLRVLEKVVRESKKAVDKILEVLKKVKGKDVVKLLKDILREIEKVHREVLKELDDLVREVEKILRDNIETLRRILEKIRRILERVAREKDDKRLLDLLRDLLRLLKELLETLEKLNERTLKLLRDLLRKLKEALRRNLKLLRELVDEAAT

SEQ ID NO: 13573 - protein, 241 aa, Artificial Sequence; identical to SEQ ID NO: 13572
  Synthetic

SEQ ID NO: 13574 - protein, 237 aa, Artificial Sequence
  Synthetic
SKDEIIKRIKDELEKLVRDVERLLRESERRIADLVRRVREILEESKRRVDELVKRVKETGNTEELIKTIKDLLRRNLEKLRRIIEEIKEVLRENNELVDRTLKRIKDLLRELLEMIRRAEIDEERLRELEEILRRVLDTLRRLAEELHETSKRVLEELDRALREIEEIHRRVLKELDDTGDVETILRVATEVVKESATVLKRILETLEEALKRNVRIIEEMLEILREVIERIARKLK

SEQ ID NO: 13575 - protein, 237 aa, Artificial Sequence; identical to SEQ ID NO: 13574
  Synthetic

SEQ ID NO: 13576 - protein, 230 aa, Artificial Sequence
  Synthetic
SEEEILREIKRLLEEHLELNERILREIKKDNKRTLKELRDIVRELKEILERIKRRIRIKSEKAKEVDKIIREVERRIDEVLKEIERLIREDNKKLDDVHEESEREIRRVIKDADRTDDLKTVVDEVRKVVDRDLKLLEELSESNIRVLEEVLRLLEELLRILEEVLKEILKASESEELRKLLEDARRALERILRRLAKIVKEIKEKHEEVLRRLEKSVREIDERLRRARE

SEQ ID NO: 13577 - protein, 230 aa, Artificial Sequence; identical to SEQ ID NO: 13576
  Synthetic

SEQ ID NO: 13578 - protein, 247 aa, Artificial Sequence
  Synthetic
SELERLERLLKEIVEVNRKALEDLRRVLEETVRRDREVLDRTRRKLEEIAEEILRELKNVKEVRDAVKELEETLREVVRRSEELLERLREIVDRVVKEVEDSNRETEKKLRDVVDAVRRGRDDKTLVAEVIEVILRDLKRNLDLLERLIRVTVEVLERSLELIKRVIEVLRRVLKRVLDIVRERRKERREDLKRLEDLVKRIEEELRRKLEKYERELRDLKRKLEELLKRYEEKVKELKRKLDEALK

SEQ ID NO: 13579 - protein, 247 aa, Artificial Sequence; identical to SEQ ID NO: 13578
  Synthetic

SEQ ID NO: 13580 - protein, 238 aa, Artificial Sequence
  Synthetic
SEEEILRRIAEEIKRLIDEDLRLIEELVRKIKTVAKRDLELIARLVEKIEEVIRRSIRVEEVVRELKKKLDEILKRVEDVVRESKKRLEDVRRKVEEAVKKSKEEIERILRRAEEGTDKKKIVEDLERVLKDHLDMNTEVVKDLKKILDDHLDANREVVKRLKEVLDDAVRVLRERIEDEEELKTAEKIIEDIKKEIDDVHREVRRLLEEIKEDIDRVNEEVKKRLEDIIEKIRRAAK

SEQ ID NO: 13581 - protein, 238 aa, Artificial Sequence; identical to SEQ ID NO: 13580
  Synthetic

SEQ ID NO: 13582 - protein, 245 aa, Artificial Sequence
  Synthetic
SIEELAEDIKKILDDALELLERLAKRAKEINDEILDELRKLVEKNKRDLDRALEKLRREGIPKEVLDELEKAVEDLKRDHDRVLKDLKKVADENKKTIKKVLDDLKRIIDEVKRMIEDLLKRLEDSKRVLTEILKVLKRLVEEIAKLLERLLESDKRVIEEIIKLLEDLNRALEELIRIIAEKIEDTERVRKLIRELEEELKDNRRLIEELVRRARKVNKRLRELVEEVIDRLRELLERIEEKIR

SEQ ID NO: 13583 - protein, 245 aa, Artificial Sequence; identical to SEQ ID NO: 13582
  Synthetic

SEQ ID NO: 13584 - protein, 234 aa, Artificial Sequence
  Synthetic
SKEETLRKEAEDLLRRLEELTRRLEKKARELLERAKKLSRDLAEELKRLLKELREKDVPEELIKVLEEVAKTSIDLNKEVIDVIRRVIEESLELNKRVLDVLRRVLDIAARKGRDKKAIRDVVREAARVIKEVIDEDEKVNRDLKRVIERVIDDDRKALERLRKAVEEVASRLDDERLKRLVEELLKAVTDLSRKNKRILEELLKAIETLSDENKKILTEILDALRRLVEKIEK

SEQ ID NO: 13585 - protein, 234 aa, Artificial Sequence; identical to SEQ ID NO: 13584
  Synthetic

SEQ ID NO: 13586 - protein, 241 aa, Artificial Sequence
  Synthetic
DEERKIVETLHRTSREVIKTLEKIVRDLKEVLKKNLELTERLIKRVHEVSREILRLTRENKVDEKDLERIHRELEKEIREVLEKSERDARDLLRKVERAIEELRERHKRVLEDLRRKGVPEELIRIFADLVRANTRVLETLLRILKELVDRSRDVLRKLIEIVEELARMNKEVLRKLKERDDDRVKKELEDANREVNKKLEEVLREIRELHKRVLDRLDEVLRRVEEINKRVNERLDRTAK

SEQ ID NO: 13587 - protein, 241 aa, Artificial Sequence; identical to SEQ ID NO: 13586
  Synthetic

SEQ ID NO: 13588 - protein, 242 aa, Artificial Sequence
  Synthetic
SEVEDLKRKLEEDLERHKKDVKRLKDEAERRLEEHKRLVEELERRIKKLLDELKDRNPEVKELLRVVKEIVELIRRVLEKHLKLLEEIIRLLATVLDKHLDVLREIIRLIARVLDLKEAGLDEEDLKREAEDIARKAEELLRDSARTAEDIARRAEEALKESKDDLKRILDRARELLDDIRRKKVVPKDVLRDLERILTELAKALKDLIDNSRRTLEKLLKALRDLIRESKETLEEVLRRTD

SEQ ID NO: 13589 - protein, 242 aa, Artificial Sequence; identical to SEQ ID NO: 13588
  Synthetic

SEQ ID NO: 13590 - protein, 240 aa, Artificial Sequence
  Synthetic
KEREEVKEKLDRLLEEVEKTVRELKREHDELLKEVEKLVRDLKKEHDELLKKVKDDGVPKEILDVIREHVRTNKEILDRVLEVVEEHLRRNKEILDKLLDDIRKVVEDAKRILEIDDDETLRRAVRRILEELRKLVEDIRKKVKDSLETLERALEEAEERIRRSLEDLKRVLKEAKDKTKDKDRLDKVEELVKKLLEDTKRTVDRVRELVRKILKKSRETLEELERLIEKILRELEKDAR

SEQ ID NO: 13591 - protein, 240 aa, Artificial Sequence; identical to SEQ ID NO: 13590
  Synthetic

SEQ ID NO: 13592 - protein, 240 aa, Artificial Sequence
  Synthetic
SERETVKRRLEELLKEVKRTLDKLKEEHDRLLEDVRRVVEELKREHDKLLKEVKDSGVPEELLRVIAKVLETNKRILDDLLRVVKKHVDLNKEILDRILEMIKEIVERVKRVLEDDDEKTLRDKIRDIIRRLEDAAREAEERVRRSLEELKKAVEKIRKKIEDSLRELEEALKRVRDKEEDDKRLEDISRLVKRLLDESRRVLRELEETIRKRAEESKRVLEEVKRLVEKLIRELRKEAE

SEQ ID NO: 13593 - protein, 240 aa, Artificial Sequence; identical to SEQ ID NO: 13592
  Synthetic

SEQ ID NO: 13594 - protein, 239 aa, Artificial Sequence
  Synthetic
SEDEIIKKIIEDLRRVLKEVEEIHKEVEERLDKVLKEAEEMHKEVLKELDRVLDEVKRIEDVETVLRLAIEAVRRALEIVRKVTEDLIRVVRKLLEIVDRVNKRVKKAVEDVLKLLRDTLKGSKDVERVLDEARRLLEKLHRDSRRILKRIKELLDELKELSERILERIKRLLEEVERRNSDDERLLEELIEELKDLIRRHIELLRRLIERLKELLKKHIEDLRRLLEEIEKLLEEARK

SEQ ID NO: 13595 - protein, 239 aa, Artificial Sequence; identical to SEQ ID NO: 13594
  Synthetic

SEQ ID NO: 13596 - protein, 241 aa, Artificial Sequence
  Synthetic
SREDEVRKVVEKVLRDSKRSMKELRDVVTEVLKKSKEVLRELKEAVDRVLKKLKDISRDVKSSDVVRELLRVLEELLERLARVLEKNLRINEELLRRLERVAEKNLKINKDLLKALADAERSEEAEKLLREYKKLVEDLARKLRRLLDEYRKLVEELEKRARELLEEIKRLIEDIKRKLERDGPSEELVKELLEFLKRVLEKAERLVRKNLEDNKELLERLERLIEENLKLLEDLLRRTEK

SEQ ID NO: 13597 - protein, 241 aa, Artificial Sequence; identical to SEQ ID NO: 13596
  Synthetic

SEQ ID NO: 13598 - protein, 251 aa, Artificial Sequence
  Synthetic
SEEEKLRELKEILDRTLKKIEDLIEESKRLNEEHVRLTREILDEIRRLLEELLRKLREAGIRDEEIETVFKEIKELLEEVLRRNEDSVRRIRKAHEEILRKLEEIAKRIRKLLDDVLRLLRGGRDRKDVLTDLLRVIKEALDALKKVLDDLHRVNEENVRLDKESLDRLLEVIDRAIKKIKKILKKAEERLSEEILKRIEDTLKRLKEELKRLVDEVRKHIEELLERSERLIRELRRTLEEILKRLKEKTD

SEQ ID NO: 13599 - protein, 251 aa, Artificial Sequence; identical to SEQ ID NO: 13598
  Synthetic

SEQ ID NO: 13600 - protein, 245 aa, Artificial Sequence
  Synthetic
SAAELVLELLARVVKLLEEVLKRLIDLHRDVLKKIKDVLDRDHELHERVLRELVKVLREAERRDEETVRRLLEEVRKAIERVLEESKKRLDEVVKDSRRVLEEVKELLRRVEEDIERVLREVKRSNNVEERILRDLEELLRRLIELLRRLLEEVRKINEEIIRLLEKLLRRNAEILRTLLRLAERDIDKREELEKRLRETLDEHRDLLRKLKEFLDRSLEDLERRVDEVRKELERVLEELKRKLK

SEQ ID NO: 13601 - protein, 245 aa, Artificial Sequence; identical to SEQ ID NO: 13600
  Synthetic

SEQ ID NO: 13602 - protein, 239 aa, Artificial Sequence
  Synthetic
KEVEDIERVLRKALELSKKVSDDLERVLRELLKLSKEVIEKLVRVLEEILELLKRENIGEDELLRRLEKRVRKIIRDAERTLEETKRELDRIIEESRRLNKRTAEDLKKLIDDVKRTRNDEEAIERLVRLIEKNLRLLEELVRRLSRLLEENLRKLEDIVRRIKELIKETLKLLEDAGVPEEDLRRVRELIKKVLKDLERVLKEAEDLHREVLEKLKDVVRRAAEMHEEVIRALKEVSR

SEQ ID NO: 13603 - protein, 239 aa, Artificial Sequence; identical to SEQ ID NO: 13602
  Synthetic

SEQ ID NO: 13604 - protein, 240 aa, Artificial Sequence
  Synthetic
DEEELLREIKTILDESLKALEELIRKIMRILDKSLKDLEEIVREIKKTIDELLEKVRRSGLPEEVLKKVKRVAEKVKEDIDRLLEDVERSHREVKKKLDELLKEVKRSHEEVKKELDSLRRDSDRDTVAREILRVLKKNLDVLREVVEKIVKVLEDNLKSLKRVLETLVDLLRKLIKVLREAGLREEALDDLRRLVKELKDKLRKLLKDYKDLLKELKDEAKKLLDDYRRLIEELEKKAR

SEQ ID NO: 13605 - protein, 240 aa, Artificial Sequence; identical to SEQ ID NO: 13604
  Synthetic

SEQ ID NO: 13606 - protein, 236 aa, Artificial Sequence
  Synthetic
SEKEKLDELRKLIEEIERELDRLLEDNKRAVEKVLRDLDRLLKKSEDDVRRVEEELDKDRVPEDVKRIIRRLLEVHREVLELVKTVIRRNLKVSEDLIRKVKEAVRELLEVIEKLKSREVLKRIREIIEKIKEILERALEESKRSIEEIKRIIETVDRRVKEIIKEVRDVIRRDVKDKDLAERIRKILDDLLEVHERVARAIEELLRELLEKNEEIVRTIKKLLKRLLDTLRKAAE

SEQ ID NO: 13607 - protein, 236 aa, Artificial Sequence; identical to SEQ ID NO: 13606
  Synthetic

SEQ ID NO: 13608 - protein, 235 aa, Artificial Sequence
  Synthetic
SKLETVIRILEELVKVHEELLRIVKKILEELVRVHRRVSEENLRLWKELLDALREDKGREDERVERIIEKAERLLREVAKRHEESIREIDRLLEEIARRAEESLKKIRDLLRKVKELAERGDSEKSIEDLVRTLIELHRRSVEEIRRLLEELVRIHRESIKEVEKLNEDESRELRKAGISEELLKRVEDVNRESRKVLEESLRRVEEALEKIERALRKSEEDIRRLMEDIKRVLK

SEQ ID NO: 13609 - protein, 235 aa, Artificial Sequence; identical to SEQ ID NO: 13608
  Synthetic

SEQ ID NO: 13610 - protein, 236 aa, Artificial Sequence
  Synthetic
SREEKIEKLIRLVEELLERLRELLERNAELIKRLLDRLRELLKELERLNEELLKKLLEKVDDEDLRRVLEEVKKSLEEVREKLERAVKEVKRLVDESRESAREVVKTIRDLLRKVRESEDKRDVVRVIEDIARLLDEILKENRRVNEEIVRLIRDVLRVIREVVKTNADLLREILRRAGGVRELEELIKKVERDHERVIKEVEKLVKELLDRSEEIHKRAKELIKEVLDRVREAAR

SEQ ID NO: 13611 - protein, 236 aa, Artificial Sequence; identical to SEQ ID NO: 13610
  Synthetic

SEQ ID NO: 13612 - protein, 237 aa, Artificial Sequence
  Synthetic
SREELLDRILEAIAKILEDLKRLIDENLRRLEEVVRELERIIDRNLKLIREILDELKKRGAREEILEKIKKVDKELEDLIRRLLKKLEDLIRETERRLREILKRIRDLLKEVKDRDKDLERLLEVLEEVLRVIKELAKELLDSLRKVLKVVEEVLRLLNEVNKEVLDVIRELAKDGEGDEIIRKLDELLKEVEKVHKEVKDRIRKLLEDHKRSLDEVKKKLERLLERAKEVVEREKK

SEQ ID NO: 13613 - protein, 237 aa, Artificial Sequence; identical to SEQ ID NO: 13612
  Synthetic

SEQ ID NO: 13614 - protein, 246 aa, Artificial Sequence
  Synthetic
SEREELLERIKEILKRVKDKLDEDLKRLKEILEKLKEKADRDLEELRRRIEEVREKLERTGRTDELVKEVLDTVRRNLENLKRLVEDILRKLEENVKNLTDLVREILKLITELIKRLEDGGLPKEVLDALRRVLEKLEELLREILERLKRSLEKVKRKIEELLKELERSLDELRRALERIRKEIKDSETAVRAIIRVLEKHLEAVRRVLEELLKVLAEHLETVRELIERLKRVLEEAIEVVERVAR

SEQ ID NO: 13615 - protein, 246 aa, Artificial Sequence; identical to SEQ ID NO: 13614
  Synthetic

SEQ ID NO: 13616 - protein, 240 aa, Artificial Sequence
  Synthetic
DEERKLKELLDRLRENIRALRELIKDNLRLLKTLVDALEELLKDNLRLLRELAEEAARRLSEDALRDLKRVLDELKKVHDRVRRELERVLKELDEVHKEVKERLDRSLEELEDVIRKVKDERALLEALKKHVDVVRTVLKLLLDANKRALDVVRALLELILTVNKKAVDVLREILKRVVKNEKDVRELIKRVETALRESEEKLRRVAEELKKALDRSRKDLEEVVRRTEDLLRRLEEKLR

SEQ ID NO: 13617 - protein, 240 aa, Artificial Sequence; identical to SEQ ID NO: 13616
  Synthetic

SEQ ID NO: 13618 - protein, 240 aa, Artificial Sequence
  Synthetic
SEEETVRRLLELLKENIEELRELLKRNLDLLRKLAEELKKLIEELARITERLAEKLAKDLSEEVLKELEDVLRELKRVVEEVKRRLKKVLDELREVHKELKKELDKSLEELRKKLEEVSRKEDLTRALADHVRVVKEVLDKILEVNRKFLEDVKDLLRLLLEALEKALKELERLLRRVVDKEEEVRKLVEELRRAVKRVRDLLDELRRRLEEALRKSKRELETIEERTRRLLEDIKRDLD

SEQ ID NO: 13619 - protein, 240 aa, Artificial Sequence; identical to SEQ ID NO: 13618
  Synthetic

SEQ ID NO: 13620 - protein, 242 aa, Artificial Sequence
  Synthetic
SEEEEIVKRLKELIKRNLELLDKTLKELKKTLEDIIRTLTELVKRAKEINKELIDRLREKGVREEAEKKLRRSDEKLEEVVRRVKEKLKRALERLEEAIKRAKEKIKRSIEKLDKLVKDLRSEEMKRALKEVIDEHIKILRDIIRLLEEVVETIIRVLREAIKLLEELVERNIRVLRDIVRADKLEREDIRRYEEKLRKLVEEVKKKLRDLEERLRRLVEKIRKLLEDSERRLRTMLDEIRR

SEQ ID NO: 13621 - protein, 242 aa, Artificial Sequence; identical to SEQ ID NO: 13620
  Synthetic

SEQ ID NO: 13622 - protein, 246 aa, Artificial Sequence
  Synthetic
REKEEKVKKVREVVTELKRELDDMLRRVKEAHERLKKKHDDLLKEVREVHKRLKDRLDERGGDEAIKEVLDRHLKLVEEVVRANKEVLDRHLKLVEDVLRALKEVLDKVLKLVEELVRRRDEERAEDLVRRVVKEIDKLVKEIRKRLEDVSRDVRRLLDELRKINKRVSDEVKRLIEELRKRLSGGDEEIKKTIEEIIKVLRELNDKLRRLSEDTIRVLEELNKEIARLLEKLVRDTKRLLDELTK

SEQ ID NO: 13623 - protein, 246 aa, Artificial Sequence; identical to SEQ ID NO: 13622
  Synthetic

SEQ ID NO: 13624 - protein, 247 aa, Artificial Sequence
  Synthetic
SVKEVIKEVLDRVVKLIKDVIDALKTVLDRHLRLNRENIRALLEVLERILELLEELVRKSTDDRAEEVLRRVVTKIRELLERIKRESDKVSEKVRRLVEEIRRILKEAVDRIKKLVEELRKALEGIREEIADKLRKIEKKIKRILEELRKMLEELARTIEKLNKDDEDTVRKTVETIERILEEETRSTDDLEKLLRKVRKIAKELADELRKLHREVKETHEDLKRKLDKLLKDIRKVVEDIKREVDR

SEQ ID NO: 13625 - protein, 247 aa, Artificial Sequence; identical to SEQ ID NO: 13624
  Synthetic

SEQ ID NO: 13626 - protein, 233 aa, Artificial Sequence
  Synthetic
EKEELVEEILRRLKKMSERFSRVVEEILKLLEDSSRKVEEAIRRTIRELEKTLKRVEKDGKTDELLRDLKRVVEDIKRKLEELLRDHRRILEEIRRKLEELHREHKKILEEISRRLGTEDELARLIIEVLRKNNKALRDAAERIREVLKENHDALKKVVEDIVRVLEEALEVLTKLDSRELREAVKKVIADLEKILKDLRKLDKESLDKLREILKTLRDLDRKSLEELEEIRR

SEQ ID NO: 13627 - protein, 233 aa, Artificial Sequence; identical to SEQ ID NO: 13626
  Synthetic

SEQ ID NO: 13628 - protein, 245 aa, Artificial Sequence
  Synthetic
SREEKLREDLDRVFRKNEEELKRVEKEVKKLLDDSKRKLDEVKKELEDLLEKIKRLLDRPGTAELVERLIKELKDTLEKLADLVRDANRLIKELLDRLRELAERVNDDTRKTLETLERTLDKDDVIRKLREDVTRVNDENRRVVEKLDELVRDVNRRNEEVLREAKKRIDEVIRELEEIKRDRKDDEELLRALKEVVRKVIEIVRRLLELHRETVKELARVIKEILRLHLESIKKLLDVVREVLR

SEQ ID NO: 13629 - protein, 245 aa, Artificial Sequence; identical to SEQ ID NO: 13628
  Synthetic

SEQ ID NO: 13630 - protein, 237 aa, Artificial Sequence
  Synthetic
DEEEKVRRLKELLDRTLKKLKELVEEHDKILDELLKKLEELVRRHNKLLDDLLRRVEERGLDEEVLRRLREVVERVKRENRKVLEDIRRVVEEVKKKNRDVLKKAEDVIRKVKEDADRSRDKRMLVRLIEEVAEVLKDLLRLLKESDEEVIDALRKALERLERSSEKLAKVVRDVIREENLEEELEDTVRKLLETSKKLLDEAREVLERLHRRSEELLRRVEETLRRLEDEVRKITK

SEQ ID NO: 13631 - protein, 237 aa, Artificial Sequence; identical to SEQ ID NO: 13630
  Synthetic

SEQ ID NO: 13632 - protein, 237 aa, Artificial Sequence
  Synthetic
DKEDKLRKIKELIRKLLETIKRLVEEHDKELDETLKKLEDLVREHDRLLDETLKRLEERGLPEDVLRELKKAVEDVKRKNKRVLEEAERVIRDVKRENKEVLRTLKRVVEEVEDALDRTRDDKAVEDLIRKLIEALKEALDRLRRSDEKVVEVVRRLLKLLKDSSKDLADVLREVIRKTNEEEELERDLERLEKTSEDLLRRVKEEIDRLHERSKKLLDEARKKLEELLKTVKDIAK

SEQ ID NO: 13633 - protein, 237 aa, Artificial Sequence; identical to SEQ ID NO: 13632
  Synthetic

SEQ ID NO: 13634 - protein, 238 aa, Artificial Sequence
  Synthetic
SEREELARDLDDLRRRLREAAEELKKKHEKLRRELEELAKELRKRHEELKKELDDAARRGEPSEDLVRRIEEVIDDLHEKVRKIIEEIKRALDKLNEDVERLIREIKRVLDELLDKVRRRGLPKDVLKRLEDVLREIKEELDRVLKEHKETIKKVKDALDEILREHEEVVKKLKKELRDSKEEEVLKRILDKLMKVSEDVLRKLEDLLREVIELTKKVLDLLDELLKRVKKVLEEVMK

SEQ ID NO: 13635 - protein, 238 aa, Artificial Sequence; identical to SEQ ID NO: 13634
  Synthetic

SEQ ID NO: 13636 - protein, 240 aa, Artificial Sequence
  Synthetic
DREKKVRDIEEDLKRVLDKLRRRVETSKEELKKVLKRDKENADELEKTLRDVVRELDRKIDSEVLRAVREIVKRLVEVVRRYNELSEKIIRDLVRVNDRVLELLKRIVKRLIDVVRELEEIEDKEKALRRLEEVVKEVKRRIEELLKELEDVHRELVKILEEVNEDLKRVATEVKEIIKTIIKISEVAKELDEVIKRLLDNLKENTDRLKEVIDRNLKDLRDLAEELRRVIERLLEDARR

SEQ ID NO: 13637 - protein, 240 aa, Artificial Sequence; identical to SEQ ID NO: 13636
  Synthetic

SEQ ID NO: 13638 - protein, 238 aa, Artificial Sequence
  Synthetic
DKEEVLKDIKRKLDDHRRRTDEIVERLERLLKEHEEKTRRLLEDVRKKLEELKEIIKRKEQSEELLIKSVEELLRETKKILEDLIRHLDELVKRILDILRDLDRHLEELIRDTKRILEEGDAEERLLKKLEELLRRLLKRNKEALERLKRILEELLKRNRDALKRAEDELRKVLEDLRRRPEEEVLKRILDRIEELLRRLVKVNTDSLRELKRVVDELVKVDRESLRELERVLRELTK

SEQ ID NO: 13639 - protein, 238 aa, Artificial Sequence; identical to SEQ ID NO: 13638
  Synthetic

SEQ ID NO: 13640 - protein, 241 aa, Artificial Sequence
  Synthetic
SKEEEIVRELEKILRDHLRKVERIVEDLEKLLDDHLKKIEELAKRLEEIIREAARKLEEKGVDDKVIKKIRELLREIEEELRKVLEDVRRLHKKLREELRRVVKRIRDLHKRILDELRKDTREDAIRRVLELIKKVSREILELVKRVLEALRRISREVAKLLRRVLETIRRVLEEVVKEVEDEEVKELLKRVEKLIDDVRKKVEDLHRELEKALRDIDRKVKRLNEELERLVEEVEEKVKT

SEQ ID NO: 13641 - protein, 241 aa, Artificial Sequence; identical to SEQ ID NO: 13640
  Synthetic

SEQ ID NO: 13642 - protein, 233 aa, Artificial Sequence
  Synthetic
SESEELRRKLEELEKELRDVLTKDRKMLEDLKRRLDKLVKDSERRIRELKRRLDEKIKDEDVKRVITRLVEEIKRVNEEVKKALEDVLRELRKVSEDIARLLKRVIDDIRRVLEELDRTTDKETADRLLKRLKEIIDKVREDVKRLNDKLRELVDRVRKRVEELHTRLRELLKKLNLPREIVEELRKVIEDHERLVREILELLRKAIDDNHKLVRDLLERLKRALDETREDRR

SEQ ID NO: 13643 - protein, 233 aa, Artificial Sequence; identical to SEQ ID NO: 13642
  Synthetic

SEQ ID NO: 13644 - protein, 241 aa, Artificial Sequence
  Synthetic
RETEETLKKLEKLLRKMLEVSKRLNEEDEKLLRTKRKLIEDLLRRVEELLEETRRVVSNTTDERVLRRADEVLDEVRKIVEDVERAVEEALREVERVNEEIIRKNEELVERVKTVLERIRRIREKEKILRALKEVVEILKEALEENLKAVRKSIEIHRKVIELLVRLVERIVKILREILEEVVDDKDLVETLKRKLDKLLRDIRELAKDYKRKLDRLLEDVERLHRELKKELDELLKEVKD

SEQ ID NO: 13645 - protein, 241 aa, Artificial Sequence; identical to SEQ ID NO: 13644
  Synthetic

SEQ ID NO: 13646 - protein, 245 aa, Artificial Sequence
  Synthetic
SELEKLLTDLERVIRKVVEDLRRLLEEHKKALDEDKKRDEDSNEELADAIRKVIEKLKRTTDEEIIERALRELLKVATEVIKKNIESNRESVKVTRRVIKDIVEVVKRLIDVLRKVIKEIVRRDPRRDKAEKVRRLVEELARRLEELLREIRKLLEDSTRKVERLNEEVERLLRELAETVKELTDKRAREEDTKRLLEKIHDDHRKLVEENERLLREDHKTLEDLIRKIKKLAEEILELTARETK

SEQ ID NO: 13647 - protein, 245 aa, Artificial Sequence; identical to SEQ ID NO: 13646
  Synthetic

SEQ ID NO: 13648 - protein, 240 aa, Artificial Sequence
  Synthetic
DEREVLKEILDLVRRLLELALEILKRSLELLRRLAEEAKKVLDRSVELLRRLVREAKEAAKNPDERVKREVVEKAERVLEESKRRLTEVLERIKRVLEESKRLIKEVLDRIRDVIRRVKERRGEDKDVKKLLDLLRELLRELKELLEDHLRIIEEIIEKLKRLIDEHLEILKKILDRLRREGITDELVKEVEDRLRESEKKLERLLEDVERLLRENEERLRRLLEEVERLLRELAETLER

SEQ ID NO: 13649 - protein, 240 aa, Artificial Sequence; identical to SEQ ID NO: 13648
  Synthetic

SEQ ID NO: 13650 - protein, 241 aa, Artificial Sequence
  Synthetic
SEKEEVEKRLKKVDEDTKRAVEEVKKAIEEVLRRHEEASKRVEEAIRRVLKELEDLKEDESVLRRVLRMIEEISKEHIRVLEETLKLIEEIVKKVLDVLREDLDASREVVERVERAIKDEKTLRELREILERHERLMEEVLRRLEKLLEEARKFVERVKRENKKLLDDARDVIRRLEEARRDVDREELLERLKELIKRLLEALKRLDEEVSKLIDELLKRLEKLAKEVLDLNRELLERTRR

SEQ ID NO: 13651 - protein, 241 aa, Artificial Sequence; identical to SEQ ID NO: 13650
  Synthetic

SEQ ID NO: 13652 - protein, 244 aa, Artificial Sequence
  Synthetic
SDEERLDKVLKEAEDIIRELERLLRESLETLKRLIERLEKLLRDSLEELRRLIEDLARKRVPKEILDRLLTVHEETLRLLKEVLDKLLEVHKEILDELKKILEKLLRAVEEILRRLKKIRRERELEEVLKRLKKALEDIKRELEEVLRRDEEVNEEAKRDLDRIVERNERANREIEEELRRSNVPEDVVRMLKEVSRRDEELTRRLLRMAKKLLEDNEELSRRLVKKLDEVLKRVEEIIKRETD

SEQ ID NO: 13653 - protein, 244 aa, Artificial Sequence; identical to SEQ ID NO: 13652
  Synthetic

SEQ ID NO: 13654 - protein, 246 aa, Artificial Sequence
  Synthetic
SREERIRKLAEDLKRKIEELLRRVRKLAEEHKRLIEKILEESERLAEELKRRAEELKKRLDKEEILRVVDKLIKILKKLVDAHRRSLEKHLRVVDELIRRIEEVLKKLLEILDELIKLLENRDSKEVERVLREVLEKLERVIRELEKLLREVLKASEDISREDMKAIRDVLEDLKRVLDEIRKKGVPKEVLDELRRLLELLKKLVDRLLELNKRLNDHAKKLVEDLLRLLKKLLEEIKKLVDDARR

SEQ ID NO: 13655 - protein, 246 aa, Artificial Sequence; identical to SEQ ID NO: 13654
  Synthetic

SEQ ID NO: 13656 - protein, 236 aa, Artificial Sequence
  Synthetic
SEEERLEEEVRRELERYRRTVRRLAEEVKEELERYEREVKKEEEKLEKTLEDLERELTRDGLDRESAKETLRKLREDIRRTLKKNEDLLRKIEKRIKEVLDRNEEMLKRIKELVDRGNLDRDKLERIERLIKRLRELSKRVAEELERLIRELRKLNRRVLEELDRLLRELEDRLRKTEDKKTIAEELKRVLRELTRILRELVKLNSDVVRRLLEVLTRLAKLSEDVVREILEIERE

SEQ ID NO: 13657 - protein, 236 aa, Artificial Sequence; identical to SEQ ID NO: 13656
  Synthetic

SEQ ID NO: 13658 - protein, 245 aa, Artificial Sequence
  Synthetic
SEEEKLETVREELRRALERIEELITKNEKKIEDTLRDIRREIEENARTVKEALERIKKDGVDREDLKDIKRRYDEMLEKLKRELDEIVREIKERHERLRKELDDIVKRVEEKLRELRKKPNSEELIRELLEIVREALERIRRLLKKLLEANERLLKRIRELLDELLKANDKLVKDLEDILRKENMPKEKVDRTKEELERLKKEHRERVEETKRKLDELKKEHEREIRKTETDLRRLLKELADRAK

SEQ ID NO: 13659 - protein, 245 aa, Artificial Sequence; identical to SEQ ID NO: 13658
  Synthetic

SEQ ID NO: 13660 - protein, 247 aa, Artificial Sequence
  Synthetic
SEDEKLRKLVEEVERTLKKLIDYLRENVEDVDRILRRLKELIDRHLKKVRELIEKLLRGGIDRKELRDLKRRVEDLHRKIREELKELKKRYKELIDRIKEDAERILKEAKRKIDEIEKLDDDRKSLLKALEEIVRDLVRLIRELLRKLKEINKDLVKAIRELLEALLEIHKRIVDAIRDIVRRELREDKDTVREIEKDLEDSKRELERIKEEIEELLKRLEDKNERAIEEIEEDLKRLEERLREAAK

SEQ ID NO: 13661 - protein, 247 aa, Artificial Sequence; identical to SEQ ID NO: 13660
  Synthetic

SEQ ID NO: 13662 - protein, 248 aa, Artificial Sequence
  Synthetic
SEEEKLRKTEEDLKRTLEELKKILDDHLRIIERLLREIKRVLEENKRNARRLLEEIKRSGLDTEELKRIEEEYKRRLDEILRELRELVEEAKRLHDRIKEELDELRKRVKELLERIRRSDRDRKELLKELEDVIKEAVDAVRRLLDELRKVHKRLVDAVRRLVEKLKRINKRLVDLIREILEKMKKDLDERVLKRLEKELRDHLKRLEEIIKRLEEDLKKTLDELKRTIEDAERKLRDLERKVKEDAK

SEQ ID NO: 13663 - protein, 248 aa, Artificial Sequence; identical to SEQ ID NO: 13662
  Synthetic

SEQ ID NO: 13664 - protein, 246 aa, Artificial Sequence
  Synthetic
SILERLVRELIRLLRELLRIHKELVERVIRVLERLLEVHKKLVETIERLLDKLAELVRRGLPEKDLKTEIDRVKTELERVLRETKEEVKRLIEEIKRLEDDSRRRMKELVEEIERLIRKLEKDGTEPREKLKRAADEARRLLEELKKLHETSIDETRRILEKLKRVHEELEERTRRLDKRLEELARRGSDKREIEKVLREIKEELRRSLRELKRVLDEVKERLKESLERLRKLIEEIKERLDRIRK

SEQ ID NO: 13665 - protein, 246 aa, Artificial Sequence; identical to SEQ ID NO: 13664
  Synthetic

SEQ ID NO: 13666 - protein, 252 aa, Artificial Sequence
  Synthetic
SLEEITKRLLELVEENLRRHEEILRELLELAKRLAKEDRDILEEVLKLIEELLKLLEDNTSSEEDLKRLLKEVIEELRRVVKRVKDKWDEVVKRIEDLVKKLKELHDDTLRKLRELVRKIVTDIREKGGEAEKVKRVVEKILELVERLAKVVKESVEKLLEILRELAEVSKRVAEALLRLLEELVRVIRIKDERTLREVVRKVLEEAKRLLDELEEVHKRVKKELEDIIEENRRVVKRVRDELREIKRELDE

SEQ ID NO: 13667 - protein, 252 aa, Artificial Sequence; identical to SEQ ID NO: 13666
  Synthetic

SEQ ID NO: 13668 - protein, 247 aa, Artificial Sequence
  Synthetic
SKIEEVLERAKEVLDRLLDLHRRLVKEIEDVLDRSNELLDRLLKELEKVLDELLDIVRRRSSEEVLEELRRILETLARRLDDALRKDKELVDRLEKSLEDVLRTSERIVRKLEKELEDVVREGAVRKEVVEAIVRLLRELVEINREIVKRIVELLREHNRASRRLVEEIKRLLKEILDVARKIVERTSEEALKELKERIEEIKKTLRELLKELKKLNREIKETIKELSERLARAVEKIKRELEKLRK

SEQ ID NO: 13669 - protein, 247 aa, Artificial Sequence; identical to SEQ ID NO: 13668
  Synthetic

SEQ ID NO: 13670 - protein, 241 aa, Artificial Sequence
  Synthetic
KAEEAVEKLVRIARAIVKINEDLSREVVRILREIVRLNEETTRLLVEIAREVVKVVEDAGLSEDVVRKLRKLVKELEDLLKKSNDDIRKLVEDVRRRLKESNDEIRRLVERLEELLKRLPDDEELLRLVEELTEELLRTHEEVVKALEKLTRDLLELHRELLERVRRLTKRIEEELKRVNVSEELLRRLEELRKRLEKVLDDSRKELEKLKRELERLLEESRRKLEKLKRDLERVLEETRR

SEQ ID NO: 13671 - protein, 241 aa, Artificial Sequence; identical to SEQ ID NO: 13670
  Synthetic

SEQ ID NO: 13672 - protein, 243 aa, Artificial Sequence
  Synthetic
DDRRILKLLIDIIRKLVKLNEETADKLIRVIDELLKMAEESLKKVIDLVRTLVEIIRRERGKRDLERVLRRIKEEMERIKREHEEALKEIEERLKRIVDEHERLLEEIERELREVEREADDKPQSERVKRLRERLRRILKEILDVSRKVLKDLKDLADEILEDSEEILKELERLIREILKVTAETDDRKVVEELLRKVEKLIKDIRERYERLVKKVRDLVERWKELVRRLLKKAEDVIREIEK

SEQ ID NO: 13673 - protein, 243 aa, Artificial Sequence; identical to SEQ ID NO: 13672
  Synthetic

SEQ ID NO: 13674 - protein, 236 aa, Artificial Sequence
  Synthetic
DEEDALRTIEELVKRVNEENKKILDESEDLVRRLNEKNERINKESRDLVKKLREDAEDLDDEELVKKIIDVIRRNLELNRRSVKLVIEVLERNLELNEESIRLVLKVLEEILEILRETTRSEKLKELEKIAKRIIEEIRKALEEAKELNKRIIERLEKVLREIEKLNKELEDLVRRKGAGDERVLKLVEDAAREDERLNRELDRATREVAEEDKKLNEDIDKTLNDVIRELLEAAR

SEQ ID NO: 13675 - protein, 236 aa, Artificial Sequence; identical to SEQ ID NO: 13674
  Synthetic

SEQ ID NO: 13676 - protein, 240 aa, Artificial Sequence
  Synthetic
SSVETIKKLVEDARKKLEDSIRKIEKLVRDVEKTLRDSLKRIRDLVEKVVRTLRELLREPKTEELLRRTRKLVREVLERLKKINKEVLDILKKVLEDLERIDKEVLDLLRDIIKKLEDMNQVDEKVIRRLRRLAEEIEKRVEDINRESRKKADDIRRKVEEINERSDRAAKEVEDEARRNDSDLEELVKRITDILREHVKMHEDLIRAIAKVLRDHVEAHKRLIKRITEILEEVVKAVTD

SEQ ID NO: 13677 - protein, 240 aa, Artificial Sequence; identical to SEQ ID NO: 13676
  Synthetic

SEQ ID NO: 13678 - protein, 242 aa, Artificial Sequence
  Synthetic
DTKEEIKKLVEELLRLIEELIKRTEELNKEDNEIAERVVETHSRILRDLLRSLEEVARTRDKRVVKTLDEKAREVVKTSDKLVDEWRERSERIVEEAERLVRKLEEDVRRVIDEIRRLTQREKLKKILDELKRLLEKVIKLLEELIRKHLELAERVIRLLKEITRENLEIVKEAIDALDAGLDDDELREVLDRIRERVKRSEDKLREVLERLKRDSKRIHKDLRKALEEAKKDVDEIRKETE

SEQ ID NO: 13679 - protein, 242 aa, Artificial Sequence; identical to SEQ ID NO: 13678
  Synthetic

SEQ ID NO: 13680 - protein, 238 aa, Artificial Sequence
  Synthetic
RREEELKRIIREIERILEELRRRSREIEEKLKKVLEEHERVSRRIKERVEDLKRKVRDKEKLVRRLAELLKEASDVNHKLIRDIARLLKEASEIIKRAVKRLSDLLEEVVRVLKDGNSDERLVDTARRLVEEIVRRLEKVVEEHEEIVERVVRRLEESNRKHRRLVKEIIDRLEDLVRRNVDEKDIERIVEEALKLHEDVHDENRRILEEAIRTHREVIKRLEEIVKEAIKLIEDVTR

SEQ ID NO: 13681 - protein, 238 aa, Artificial Sequence; identical to SEQ ID NO: 13680
  Synthetic

SEQ ID NO: 13682 - protein, 238 aa, Artificial Sequence
  Synthetic
SEKELLEEIEKRAEEVLREHDKRSEEIKRELERVLKELRDLSRKIEEDLERLVREVTDLEELVRRLVEIARRASKIIEDVVRKLAKLLREASEVIKKTVDKLVRLLEEAVRLLREGNTEEERVRDLERLVEEIVRRLEEIVRKHRELVRRIVERLREIVEEHKRIVEEVVKTLERLVENRVDKKDIERIVRELIKVHRDVLRKLEKVVREALELHDRVNKELREVVERALRLLREVTR

SEQ ID NO: 13683 - protein, 238 aa, Artificial Sequence; identical to SEQ ID NO: 13682
  Synthetic

SEQ ID NO: 13684 - protein, 239 aa, Artificial Sequence
  Synthetic
SEEEILKKIEDRLRAITEKHERMLREIKKELKKVMDEHEDLLRKIEKELRDVLERLRRGVDRKEVIELLARILEKVLELNERILRKLVKILKKVIDLHREAIRELLEVLEDVLRRLRGTDDDVARELERVVRELKEELKRSVEKIERAAREIEDLLRRVLEESKRLVEELKRRLRRIKDNNLDATLLERIVERARRELTKNHDKLRKILERLERILRELNEDLRRILTTAVDILRKLRK

SEQ ID NO: 13685 - protein, 239 aa, Artificial Sequence; identical to SEQ ID NO: 13684
  Synthetic

SEQ ID NO: 13686 - protein, 237 aa, Artificial Sequence
  Synthetic
REDEVLRDIERLLREIEEKIRRILEESTRELRKVEEEVKRIIERTKRELKKIKEDVERKGIDEELRKLLDEVLDKLTKLIERNKRSLERILELIKRIIDENLEVLRDIIRLLEELLKMTKDNRVPKDEVIKLVEDVVRRIEELVTRVVRRNEKLVKDLDDLAKKNVRENEELLREIDRKLDRDLLEKIKRVIREHIKALEKLARDLKEILRRHIEALKELARDLAEVIRKLLEDVKR

SEQ ID NO: 13687 - protein, 237 aa, Artificial Sequence; identical to SEQ ID NO: 13686
  Synthetic

SEQ ID NO: 13688 - protein, 240 aa, Artificial Sequence
  Synthetic
DLERLVELLKRIDDEAVKLVRKLVEVLKRIDEELVRLVEELLRALRRINEEVVRLVKRVPDKKKLKDRSEKLIREIEKLLDELRRRSEELLEEIRRLLERLKDESRKLLKRVEKELERVTDKKALELTDRWLKLHKEVVDRLAKLLRDWLRLHRRVLRELEKLTKEHLTEHERVVKILEDGRREEELLKRLRRIVEESKRRVDELLKELRKISEDVAREVERLLRELERISREVKRRVEE

SEQ ID NO: 13689 - protein, 240 aa, Artificial Sequence; identical to SEQ ID NO: 13688
  Synthetic

SEQ ID NO: 13690 - protein, 240 aa, Artificial Sequence
  Synthetic
SDEEVARELSDIVRKLVERNKESIEDAMRIVKELVDRNKKVTEDVLRLLEKLLEDVRDTPNDEELLKRVEEIVRRIAKELDDLVKETRKIVEEVEKRLRDDVKRTEDIVRELVKRAEEVNRTEKVEEAIKKIIRLLEEHVRIIREAVERIIRVLEKHVRIIEEIVRALITLARRIVELIARNGSEEFLRRLKEEVRKIVEKVKRDLERSLKELERILEEVKRMLERSLRELERVLKEIKD

SEQ ID NO: 13691 - protein, 240 aa, Artificial Sequence; identical to SEQ ID NO: 13690
  Synthetic

SEQ ID NO: 13692 - protein, 231 aa, Artificial Sequence
  Synthetic
SKEEILRELEELSRRLVEKLKDLLRKLEKLSDEVVKELRKSLEELKDLADKMVKKLGDSEIARELLKVVEEHVKLLEEILERLKTVSKDIVRVVDRIAKKLLEVTKEIVELVKRLKTDKDALRELERKLEDVHRRIREELKRLLDRLRDLHRRLKEILEDSKRKLEELLTRANSDKRLLEEIVKLLRDVAKRNLDLLEKHRELLERALEEVKRLLDEHLKLLRDALRRLKK

SEQ ID NO: 13693 - protein, 231 aa, Artificial Sequence; identical to SEQ ID NO: 13692
  Synthetic

SEQ ID NO: 13694 - protein, 237 aa, Artificial Sequence
  Synthetic
SREDLLRKLKELIETILRKSSELLDRLLKLVREHSETSERLIRELKKILEDILKLIKGGISEDDVRRIVKEAKDELRRSVEEVKKSVDDLKEELKRSLREVRELVKRIADALEEIVRRSSSLREVIKKLLELLRRLLEVHERTIRLLAELLERHLEVHEESIRLLLRLLEELLELVERKGDEKELRRIKEAVERVLRDHKRKNDKILRDVEEVLRRHLEELRRILKDVKKVLDEARK

SEQ ID NO: 13695 - protein, 237 aa, Artificial Sequence; identical to SEQ ID NO: 13694
  Synthetic

SEQ ID NO: 13696 - protein, 237 aa, Artificial Sequence
  Synthetic
DDEELLKRLEDLDERLLRFSKENLEELRRRTRELIETSETLLERLREIIETILKVIRDGARKEEVKKLVDELERVLEESLREVKRLVDELRETLKKSLEDVRRLVREIEEVLDKIVEDSSRLKDVIDKLREILKRIADIHEESLRRLVELLEELLRAHERSLRKLTELLRRLLEAVRQGGPERFLEEIAERVERILKEHRELLKRIEDEVRRVLTEHKKKLEKLKREVERVAEETKT

SEQ ID NO: 13697 - protein, 237 aa, Artificial Sequence; identical to SEQ ID NO: 13696
  Synthetic

SEQ ID NO: 13698 - protein, 237 aa, Artificial Sequence
  Synthetic
KETDEVVKRAKELVDTLLKVIKEHVERLKRLVEELLKVIRDHVRILRELAKRLREKVVKSEIADEVEKIVRDVARENERVVERIKRLAERNARSNDEVVRRIEELVDRLAKLAKKLDKKELLDTLKRITDEAIRLVEELLEENKRSMEELIRLVEDILEKNRRVEKKIIDLVRREPTTSDVERVLEELRRRLEKSVEEVERVLKRLKEELDKSVEEVKDVLRRLLEDLKRVVEELRR

SEQ ID NO: 13699 - protein, 237 aa, Artificial Sequence; identical to SEQ ID NO: 13698
  Synthetic

SEQ ID NO: 13700 - protein, 240 aa, Artificial Sequence
  Synthetic
SEEERVLEEIKREIDRIVKRARELLEKYRELVERIKRRNEEILKKYEKLLEEIERLADAGVPKEELLKLLREISKEHLKVLKELLDLVKELSDVSLEALKELLEELTRIVKEVLKALRRADIPEVDKVIETLERLLDELREVVERIIKRDADLLRKIEKVVRDIIETDKKLLEELERLIRAGVQERDLKRALRRHAEELTRLNKELNELLKEHEDELRRLLAELDRIVRKLLRTLKELTE

SEQ ID NO: 13701 - protein, 240 aa, Artificial Sequence; identical to SEQ ID NO: 13700
  Synthetic

SEQ ID NO: 13702 - protein, 236 aa, Artificial Sequence
  Synthetic
SKEEEAKRVIDELREELRRILRENTELVKESERRITELLKENSDLVEEVRRRLEEVLEKERDEKIKRLVELVEELLKRHNDIVRRLVKLHRDLLKRHNDVVRRLIELLDDLLRKLVEAIERGEDEKRLRKLLEDARRRIEKLERESREELKEVHERLKKLADDSRRLLEDVKRKLEEEGTREDLKRLVDDVLRLAEESHRKIEELNRRTLKLMEDSHRKLKELVRKALELITELTR

SEQ ID NO: 13703 - protein, 236 aa, Artificial Sequence; identical to SEQ ID NO: 13702
  Synthetic

SEQ ID NO: 13704 - protein, 242 aa, Artificial Sequence
  Synthetic
DSIERLAEELDKIVTDVLRVNEDSVRTWTRILEEVLRLNRELARILIDIARRVLELVKRKSPEEDIKRLTEELKRVLEEYERRLDRLTEEARDALREYERRLEELKERLRRALDRARKDVDEEVEKITRETEKELERLTETHKELVKTLEELLRRIVDDTARVIKEILDLLKELLDMTRELSEKELLDEVRRLLKRVKELLKRSIDLVEKILRDVKRLLDESIELVKRVLDKIRRLLEELAR

SEQ ID NO: 13705 - protein, 242 aa, Artificial Sequence; identical to SEQ ID NO: 13704
  Synthetic

SEQ ID NO: 13706 - protein, 239 aa, Artificial Sequence
  Synthetic
SEEDEVLKTLDRKHKEAKKELDKVLRELEEEHKKVKRELDEVLKRLEDIHRRITELLRRGDIRLEDVLRMVKEANRELVEVIKRIVKTVEDLNRRAVEVVKRLAEELERLNREMVKVLRKSGREEEIEKDLRRSSKDIRRLVEEIERRLRDSLRKLRKLADDLAKKLKESLDKLEELVRRGVDEEAVERVLKENKELIEEIVRLIRKILDENIELIRRIVRLLERLLRENLRLIEEARK

SEQ ID NO: 13707 - protein, 239 aa, Artificial Sequence; identical to SEQ ID NO: 13706
  Synthetic

SEQ ID NO: 13708 - protein, 248 aa, Artificial Sequence
  Synthetic
SKEEDVRRLIEELVRELRRILEENRRMLKELVEKLEEVLRRSEEVWRRLAKELDELLKELNRDVVREAVETIRRVLEDLVELDRRVVKVIKEVLERHAKSSTELVRELEDVLRAAVEAIEKVKREEDLKRELRKLKERLKKVLKRHDDTNKELFRELEDVLRKHEEELRRLADELRRLLEDLKRKGDIPEEVIKKIEDLVRKTERELREVHKELRRLVEEAKEVVDRSVEILRDLVRKIVRILEESAR

SEQ ID NO: 13709 - protein, 248 aa, Artificial Sequence; identical to SEQ ID NO: 13708
  Synthetic

SEQ ID NO: 13710 - protein, 249 aa, Artificial Sequence
  Synthetic
STEDELRKIKEELEDIRRRIEELDKKDNEDLDRIDEEIKRRLDKNIRDLDEIAKEVRKRRQDKDLLKEIVERLAEVLRHHVRVTADVVRLLAEVLKHNNELLKEAVRLLTELLRKILKVLKDAGKPEDEVRKLKEELEEIERRLRELVERNRRLSEELIRRAEKNVEDVRKKVEDLIREAEEVVKANLPKEELAEITERLLKKYREVAEENMRSLKELLREYREVNTRTHKALERIIDRIREILEKVRK

SEQ ID NO: 13711 - protein, 249 aa, Artificial Sequence; identical to SEQ ID NO: 13710
  Synthetic

SEQ ID NO: 13712 - protein, 233 aa, Artificial Sequence
  Synthetic
KEKEAIKEVAELLKRLIDDLLRLLKEDVDTARRVLDEIKKLLEENERIAREVLRRLREDKGKERAEELVREWIERTREILKRIEELLRRWTRKTREILKRIEELVRRVIEVVRRLDVPKELVDKLEEVLRKLLKLVEDHVRKVEKIIRELLKLIKEHVEKVERIARKLLELLRRNRDETDLDRIVKEMEKVLEDSIRELEKLVKRLEDILRESEKALRDLLRELRKVLEEVRT

SEQ ID NO: 13713 - protein, 233 aa, Artificial Sequence; identical to SEQ ID NO: 13712
  Synthetic

SEQ ID NO: 13714 - protein, 230 aa, Artificial Sequence
  Synthetic
SSMETAVKLVKDLLREDIRSNEEHVRLAKKLLEEDIESNERLLRILKKLLDLVEKTEDDEKLRKDLREVLEELRELVDRNKKRLEDVLRESERLATENKKRLERVLRELERTGLEERVLREVRKLLEELKELNDRTLEETRRLLDRLKKLNEEILELLERLLRRLEKLRKDKSDREELRRVAEEIKRRAEELLRRTEELVRDILRRHEDALRRTEELVRRIEKRLRDATR

SEQ ID NO: 13715 - protein, 230 aa, Artificial Sequence; identical to SEQ ID NO: 13714
  Synthetic

SEQ ID NO: 13716 - protein, 247 aa, Artificial Sequence
  Synthetic
RELEDVLRMIEELARRLVEILERHNKLSKRVIELLVRILEEHLKLVAELIKKAVEILRRILREDGKLAEEVIKRLEDAVEESKRNVDETKRKLKEAVRKDNELVKTVKEILKRVVDTVRELVKNNGDKEEIIRLIREMLKKLEEILRESEKLLRDLLEEAERSLEENIERLERLLEDLKRIIENANVRDDIRKLLKELLDDVKKIIDDSRRLLDELRKELEKILKESEKLVDELREAVDRLIRKVRE

SEQ ID NO: 13717 - protein, 247 aa, Artificial Sequence; identical to SEQ ID NO: 13716
  Synthetic

SEQ ID NO: 13718 - protein, 237 aa, Artificial Sequence
  Synthetic
SREELLKELRKLVEEIKRRSEELLRRLEKLLEDNERRTRELLERLKELLREIEERIRGGRPSEEVIRLLEELVRAIERVLEEHLESNRRLVEAAERVLREHVELVKRLVRAIEDVVEKELEEDKIRTIKKLLDEWRRRLEKLVRDVRRKLEEWIKRTEEMIDEVRRLLEELKETIRRKGNDRDIVRELTELVRRLLKRVEELLKRSLEILRELIKAIADAIKESLDILDRLLREVAR

SEQ ID NO: 13719 - protein, 237 aa, Artificial Sequence; identical to SEQ ID NO: 13718
  Synthetic

SEQ ID NO: 13720 - protein, 242 aa, Artificial Sequence
  Synthetic
EEEEVLRRLRELIERLVRETEEKLKEIERRIEEVLERHRRALEELKKEIDEILEEAERRKEKVEDVVRELRRIAERLLEINERSLELLRRILKALEEIVTRHLDTLRKIAEEIIRAMRDSEKAKKLLEDLRRLVEENKRRVDELVKKVERVVEEIEELSRRLLEKLERVLKEIEDVAREGTSEEALRRLVEKVKRVLEEILKVSEEVLEKVKKVLTDILKRLKELVERNVRLLERILDEARR

SEQ ID NO: 13721 - protein, 242 aa, Artificial Sequence; identical to SEQ ID NO: 13720
  Synthetic

SEQ ID NO: 13722 - protein, 241 aa, Artificial Sequence
  Synthetic
SKIEKLLRVIKKIIDKLEELLKRLLEVVRESIELLKRILDELLKVVERTADELRRIVNDKRLLEIIEDLVRRVLELHERTIDDVRRLVKEVEEEWKRVIDELRKLVKKLEDIVEEARKSEDLETVLRLVEELTRRIEKTTEDLERRHEKILKEIIDLIRENLKRHEDITREIIKAIEKLPTTKDLERLLRKVKEDNDRVKKEVERLLKEIEDRNRKVVEEIKRRLEEIKRELDKVVEEIRR

SEQ ID NO: 13723 - protein, 241 aa, Artificial Sequence; identical to SEQ ID NO: 13722
  Synthetic

SEQ ID NO: 13724 - protein, 241 aa, Artificial Sequence; identical to SEQ ID NO: 13722
  Synthetic

SEQ ID NO: 13725 - protein, 241 aa, Artificial Sequence; identical to SEQ ID NO: 13722
  Synthetic

SEQ ID NO: 13726 - protein, 238 aa, Artificial Sequence
  Synthetic
KDEDKLRRIVAVLEDLIRLTEELAKILKRVTERLKELTEELKRRNEKVVEEILKLLRDSGLQTEDVTRKLKKIRDDYKRITDKLREDHERIREELEKILERLKREHERIIRTLEEISRKLRGEELVDTLLRLVEEVARINVEVLERLIEIVERLVEINRRVLEEILRLSAKLAEDLDRSIGDEEVVRRIRELATKNLDDNRKALEESRRIIEEIVKRIKDVIRTSREIIKELRKEIRT

SEQ ID NO: 13727 - protein, 238 aa, Artificial Sequence; identical to SEQ ID NO: 13726
  Synthetic

SEQ ID NO: 13728 - protein, 231 aa, Artificial Sequence
  Synthetic
KEAEELVEVVRKHIKTLAEIWKKLVDALRKHVEILRRLLKELVEVIRRAIERVRRDGIPEEVIRDAERVLRRIEELIERLLRENERVIREVEELIKRNLDENRKVVEDLKEVVDRNGDKRELTEIVRRLLKSNKRVAEEVVRLTERLLRENKKITDELVKIVEDLLRRITKTRGRTERLDTVLEELRRVLKELERKLRESIKELRDVLREVEERLKESIEELERVLDRLRR

SEQ ID NO: 13729 - protein, 231 aa, Artificial Sequence; identical to SEQ ID NO: 13728
  Synthetic

SEQ ID NO: 13730 - protein, 239 aa, Artificial Sequence
  Synthetic
SEEEIAERVKDLIRRVLEEHERSVKKVEDLIERVLREHRRVLEEVRRLAEELERRLGDEKLVRAVRKIAEDVVDIIRKILEIVRRTVELMKRIHKKVLDIVRKLVEDVLDILKRREREESVEEVKRRVERENEKLKREVEKVKKEHRDALERLAKEVDDVLRDAKRFLEELEKDVSNIEDDRRKDDLRRVLEELLKRLKELLEELKRINEELLKTLEKLARDNLEINKELIKRLDEETR

SEQ ID NO: 13731 - protein, 239 aa, Artificial Sequence; identical to SEQ ID NO: 13730
  Synthetic

SEQ ID NO: 13732 - protein, 246 aa, Artificial Sequence
  Synthetic
SEEDVLRKLEEIVEELERSNRDAVRRLEEVVKRVEDLWEEVVRRLRELVREVEERLRDVEAKEVVEELVKVLEEAVRIVEKALRDHVEVLRRVVEKIADLLRRNVDVLRRVVEKLKRILEARRRVDEKEVRKRLDDIRKELEDVLRETRKTVKKIEDDLRRVHKRLDEIIEDLKRRLKEVLKRVEEKGVKKKEIEEIIERVLRLLAELLKRVKRISEDLKRLLDELIEENADILRKLDELVTRDET

SEQ ID NO: 13733 - protein, 246 aa, Artificial Sequence; identical to SEQ ID NO: 13732
  Synthetic

SEQ ID NO: 13734 - protein, 251 aa, Artificial Sequence
  Synthetic
DKERIIKRVLDELKEALKKAEKLHEDVLRELRRLLDEALKLHEDVLRELEELLRKIESTLEDEKLKKKLRDVKRDIDRLVERNRRLLEELRKRLEDLVRRNRELLERLKRKLEELDRRIKELEERGTPREELLERVAEIIREILEDIRRVVTHLRKSIRDILKEIREVVKHLVEVIRDIARRITELLAEDRNREKVEELADEIRRVVKRIEERHDKLRKDIERLVRRIEELHKRLLEELEELVKRITEELK

SEQ ID NO: 13735 - protein, 251 aa, Artificial Sequence; identical to SEQ ID NO: 13734
  Synthetic

SEQ ID NO: 13736 - protein, 231 aa, Artificial Sequence
  Synthetic
SVLETIVDIVRKLIELIEKLLRDLLELDKRNVDAVARNADKILKIAEDIVRTIASKGVPEEVKRRLEEILERIARLVRESKERLKRNNEELEKLVRKLEKELKEVLDDVKRVVDAGEDKDDALRRILELLDRLLESIKRVLKEITDSNKRLLDEHERVSKELIELLREMAERVNLDEDLKRELDRLIKEIEESNRRLKKTTKDLVDEVERILRKIKDDIEDVKRKIEEDKR

SEQ ID NO: 13737 - protein, 231 aa, Artificial Sequence; identical to SEQ ID NO: 13736
  Synthetic

SEQ ID NO: 13738 - protein, 245 aa, Artificial Sequence
  Synthetic
SEDELLDRLDESVKEVLDRHRKLLEDLADTIRRVIKKVKDLLDEHKKTLEDVIEKVLRRGIDVEELEKVKDELEKAHKKLEDDLRRILEEVKRLVEELEKHLKRIEDEAKKAIEELRRREPDKELLDRALEAIDRLLKLLTENIKRIEEIVKELLDRLKRIVDELLKVSERVVDLLRKIVDKLDTDETVVRDLRRLLEELRRISEEIVRDLRRLLEELKKIVEDVVRESKKLLDDLRRIIDETVR

SEQ ID NO: 13739 - protein, 245 aa, Artificial Sequence; identical to SEQ ID NO: 13738
  Synthetic

SEQ ID NO: 13740 - protein, 243 aa, Artificial Sequence
  Synthetic
SRAERLADEVRKAVKKSEEDNETLVREVEKAVRELKKNNKTWVDEVRKLMKRLVDLLRDNQVRDRDLLKELEEVLRRVLEALAENHERTEEILKRWLDRYREDIERLRKVLKEVIEALKREGRDDKRIVDELEEILRRNEDVLDKIKKRLRRLLEEDRRLLERIVRELKRLLDDLDRITKELKSEELVRIAIEVLKRLLEIIEELVRLNNEILERLLKIVRELHKDNIKILEDLLRIIEEVLR

SEQ ID NO: 13741 - protein, 243 aa, Artificial Sequence; identical to SEQ ID NO: 13740
  Synthetic

SEQ ID NO: 13742 - protein, 236 aa, Artificial Sequence
  Synthetic
SEVETLIRLIEENLRLLKEVADLSLEVIERLLRILKEIVKRSLDVIRRLLKLIEEVLKDRRLVERAKKEIDRLLEENDKLLKEVEKVIKELLEENRRLVTRVRRMNEELLRLIKENRKRKDDLLRELKDLNRKVLKALKESHDKLKRALEEVLRVLTESHKRLEEVLKEILDELRRRGVEDERAKKRLEDLLREHREILKEVVKRLKELLDRHRKLLDEARRESKRVLDEIDEKTK

SEQ ID NO: 13743 - protein, 236 aa, Artificial Sequence; identical to SEQ ID NO: 13742
  Synthetic

SEQ ID NO: 13744 - protein, 236 aa, Artificial Sequence
  Synthetic
SRVETLIRVVEKNLELLREIVERSLRVIKKNLRLLEEVARLSLKVIKELLEEIKRRVRTEDLLRDVERKIRDLLRKNEDLARRVREINETLLEENRELLRRAEKVNKRILDLIRNNEKPSEVLARELEKVNREVLKALEESHRKLRKVNKEVLEVLKRSHDETEKVLREILTELRRSGNEDRRVKEELKRLLEKHRELLKEAVKRSEDVLKEHKEVLDDVRRESEKVLEELRRAET

SEQ ID NO: 13745 - protein, 236 aa, Artificial Sequence; identical to SEQ ID NO: 13744
  Synthetic

SEQ ID NO: 13746 - protein, 245 aa, Artificial Sequence
  Synthetic
SEKDEVTRRIRELLKEAEETNREAIERIKRLLDRVREKVEEVAKRSEELLRRLKKVLDRDLQDDEALLKLLIDALREHNRLSTELIKILIDVLRTILKIIKDVLATNIEIARRILDLVRRLAERAGLDDRLVKEVEKLVRTAERLHRDALRKVKRLVEELEKRLRELVKTDHDLVRRLETLLRRKERRKEDLLREIARILRESLRLIRELLKEIEKIVKEIIELLERLNDELRKIIEKILETTKK

SEQ ID NO: 13747 - protein, 245 aa, Artificial Sequence; identical to SEQ ID NO: 13746
  Synthetic

SEQ ID NO: 13748 - protein, 231 aa, Artificial Sequence
  Synthetic
SRKELLKKLREVLETNLKLIEDLVRDIERALEEDRKLIEDLLRRIEEVARRILELRERGGSREEDVIREAEKIAERLKELVEKLADDSRRIVEELKKRIKELLRRSEKLVEELKKDLREDEKLLKLIEDLLRVSRRVIEALLEIVERLLEVSERVMRAIKKLIDDLMKVLRAGVEDKRLREVIKRLIEELRRLLKEYEDVLRKVREDLKKLLEEYKRVLERVDEELRKRDK

SEQ ID NO: 13749 - protein, 231 aa, Artificial Sequence; identical to SEQ ID NO: 13748
  Synthetic

SEQ ID NO: 13750 - protein, 243 aa, Artificial Sequence
  Synthetic
DEEKRVEDVLRRVEDLLRKLEEEHRRIVKRIRDELRESERKIEELVDRLRKEIDRIRKTRDDRSSVVTELIKILEEVVRAIERIVERNIEILDRIVKLHRELVKRTIEILREAVKLVAELADSEDAKRILKKLKDIVRALEEKLRRLNKEVEDVVKKLEDDHRRLVERVRRVVDELRELLERNTVRKEDLLRRTEKVEREIRKTLDDLHERTRRVVEETLRKNEELLKEIKRVVETILDEIRK

SEQ ID NO: 13751 - protein, 243 aa, Artificial Sequence; identical to SEQ ID NO: 13750
  Synthetic

SEQ ID NO: 13752 - protein, 234 aa, Artificial Sequence
  Synthetic
SKKETLVKLAEEIIADIHRVNRESLELIKRLIERVEKLTKESLDSIRKLIERILRDIDDEEVVERIERLLKKLLDENEKIIREIRELLDRLKKANEKVNEEIKKLLDDLKKELRDATDEETAIRLLVDVLRKILELLKRLSEINVRVLEEIVRLIRELSERNKRVLEDALRLVKERVDSDEVREIKEKVRELIDKDRRLVKEIEDLAREILDTDRKLVKRLEEVVRELIERARR

SEQ ID NO: 13753 - protein, 234 aa, Artificial Sequence; identical to SEQ ID NO: 13752
  Synthetic

SEQ ID NO: 13754 - protein, 236 aa, Artificial Sequence
  Synthetic
DEERVLTEIEKLVKRLKDRNDEIRRELEKTSKRLEEELERIERELDRLVEELKKELERTKDKDTIVRLIIDVVRKLLKLLEEILRLILRVIERHIELLRRLMKENIDVIKRILEELAKAADSKILEEIRRLLTEWIRKSKEIADEVDRLLKEWLDEVREIAEEIRRLAEELIKRIKDRRSDKDLEDLIRRVLTRVKELARRLDRKNKELLKEIERLIREDKETADRVKTEIKKKTD

SEQ ID NO: 13755 - protein, 236 aa, Artificial Sequence; identical to SEQ ID NO: 13754
  Synthetic

SEQ ID NO: 13756 - protein, 248 aa, Artificial Sequence
  Synthetic
DEEELVRRVEKLARDIEETLERLVKELERLYREIEKELKRLVKELEDANRRIVKRLKDLFDKKAPLERLVREVLELVKEHLKLVEDLIREVDKLNERLAEANEKLIREVLKLLKELLDIIAESVDSRKLEELERLVREVIREVAELLKRLKELHDKVSKDIRELLKELRRLHEEVIKTIKKLLDERMPDEEVLRRIEKLNKELEDVLREVEERIRKLLRELEEVSRRVTERIKRLEDELRKAFEEVTR

SEQ ID NO: 13757 - protein, 248 aa, Artificial Sequence; identical to SEQ ID NO: 13756
  Synthetic

SEQ ID NO: 13758 - protein, 236 aa, Artificial Sequence
  Synthetic
SKKEDAIRKARKLLERIRRLADKAIKRSRRLLERVRELVKESLDILRKLLERLRDLVRKIKKDGKREVLKELIRLLEELLKINKRVLDSVIELVERVIRSNEDVLRKVIRLVEELIRLVEETTDAKKLRDELRRLKEELKDIARRNRERLKRLEETLRRILKKSRDDLKRLLDEAEKKDITDELRRLTEEILKLHEESVKKLEDLTKEALEASEDVHRKLEKLTEEILRRTEEAEK

SEQ ID NO: 13759 - protein, 236 aa, Artificial Sequence; identical to SEQ ID NO: 13758
  Synthetic

SEQ ID NO: 13760 - protein, 238 aa, Artificial Sequence
  Synthetic
KEKEEADRELRELKREMEDILREVEKELRELLKKSEELLEEIERLSKELTDEAREVERNNLPEDELATELLKVIKKILDVNRDVVRKHEEILEDLERVLREVVRKLLELIRKLLDVIRRRVDSEDLKRVEELIREIEETIKKLLRELEKLIRKVKKRTRELLKESEDLIREVLDVIEKNKDLRELARKLLKRLKELNDRILETLRRLNEETARLVKEVLDTARRLLEELIRVLDETRT

SEQ ID NO: 13761 - protein, 238 aa, Artificial Sequence; identical to SEQ ID NO: 13760
  Synthetic

SEQ ID NO: 13762 - protein, 247 aa, Artificial Sequence
  Synthetic
SKEDRLREILTELKEVIDTILRKLEEDARRLKKAHEESNEKLKRIVEDLERVLRELLRKLKERVDERLEEEAKRILTEVRKELKKIEEEARRINKEYEDDVRDIERKVERIKEKLERLVERIERSDRDEKELIEEVIKVIEDVLRLIEELIKEWIRVNEKALELDRRLVEEVKRVIERLLRAIERLISKGNKELLDKAKEIVDRVTEEVERILEENERLWRESIKDVKRILDEAREIVRRLLEEVRK

SEQ ID NO: 13763 - protein, 247 aa, Artificial Sequence; identical to SEQ ID NO: 13762
  Synthetic

SEQ ID NO: 13764 - protein, 233 aa, Artificial Sequence
  Synthetic
DESEKVKEILERIERSLREVKRRVDEVLKRIKELLEELKRRHDESVKELKRILEEIRNSDKEAVKRVEKREREIIKRDIEVNERVLRELKKLLEELKKVLEENLKRLKELLEELDTTDDIRREVERLIKENRELIKRVEEEMRKLEETLRRMAKEYKREVDELEERARKSNLDGEELAKTLEKLAKELLDANRRLVDTSVKLVKRLLEIVAELVERHKESNRRLLKLIEDRDR

SEQ ID NO: 13765 - protein, 233 aa, Artificial Sequence; identical to SEQ ID NO: 13764
  Synthetic

SEQ ID NO: 13766 - protein, 236 aa, Artificial Sequence
  Synthetic
SEEDILRRVVEELERLIKEAKEIIEEIRRLHEELDRKSEELLDRLLELLRDLLRRLNVDDERLRRALERVEREIKRLKDEYKENNKRLEEEVERLKKELDDALERLKRELDKLKRDKDALAKLVKELLDVVREVVEALKRLSTHNVEVNEKLDRDLVRLWEEAVEVIKRVLRERLSDKDKVRRLDELVKELLERLRRLHEENTEEVERVLRESARLLDDLLRKVEEVVEKIKEELR

SEQ ID NO: 13767 - protein, 236 aa, Artificial Sequence; identical to SEQ ID NO: 13766
  Synthetic

SEQ ID NO: 13768 - protein, 237 aa, Artificial Sequence
  Synthetic
SREELVKDILRLLTESNDEHKKLSDKLVDLVRKLIELAEKLTEEVVDLVRRLLEELNLDEEVLRRLKEILEKLRKDNRDVLEELKKVLEELKEANAEVHRRSERLLRELKKRLDKVKGEEAVKLIEDVLREHSRLLEESVRRNERVAERLVELLEDLVDKNRRVLEELVELIARALDSEDAKELLKKVKEIVDELVRRHKKLVDEVREVVERVVREHRELVKKDRRLVDEVLKRLRT

SEQ ID NO: 13769 - protein, 237 aa, Artificial Sequence; identical to SEQ ID NO: 13768
  Synthetic

SEQ ID NO: 13770 - protein, 237 aa, Artificial Sequence
  Synthetic
SREDLTRETERLLRESNEKHKELTKEIIRLVDRLIKLLEELTERLKELVKELLKRLRLDKEVLDRLREILKELDEANRTVVDTLRKVLKRLKEELDRVHRESEELLRTLRDLAERVRGEELVERITRALETHSELLERSVELLKRVLEELVKLARELVKRNEDVLRRLVELVERALDSEDAKKLVKEVRDVVERVRREHDKLVKEIEKIVRDIEKKLRDLVREDRELVKKIEKKLRD

SEQ ID NO: 13771 - protein, 237 aa, Artificial Sequence; identical to SEQ ID NO: 13770
  Synthetic

SEQ ID NO: 13772 - protein, 239 aa, Artificial Sequence
  Synthetic
SAEDLVRRVKDLVDKLEDKLRKVVRTNERLWEEIRKRLEELVRRNKELWDRLVEKLKAGDKDKDELIEEAKRLEDESNKLVEKLVRDIERVLRESNKLLDTLAKEIEEVLEEIVELVEREGLADKKAREKLEDIKRRLKEVLKKLREESKRIIDELRRLLEEYKRLVKEIRDRIEEVRKRNSEIRVLVELVRRHNKVLKELVEELEKLVRDHNRVVEEVVRELVELLRRAVEVIKEVVK

SEQ ID NO: 13773 - protein, 239 aa, Artificial Sequence; identical to SEQ ID NO: 13772
  Synthetic

SEQ ID NO: 13774 - protein, 253 aa, Artificial Sequence
  Synthetic
REKEVIDDVRRMLEDLLRTIRRVIEENKRIVKESSDHIREVLKRVLEVLRRLLEEVKRLTERPVDEEDVKRTAEELLRILEEVVKEVEDAVERNRRLIEESIKELKRIADELVRRAEAVIEKVETELGRESEKVERIVRIIEEVIEAIKRIVKSLVEINEEYVRLVEELVKDIVDIIRRVAKLLKELADSRRDRKDVERELEKIIREVEERLRRVKEKLDDIDRRAKELHEEVMKRLEELVERIRRLLEDVER

SEQ ID NO: 13775 - protein, 253 aa, Artificial Sequence; identical to SEQ ID NO: 13774
  Synthetic

SEQ ID NO: 13776 - protein, 254 aa, Artificial Sequence
  Synthetic
SDEEILREILKTLEDVVRRLEELLKENEKLIRESTKLIKDVLDELLEIIKRVAKLIRDLKRNKVDEKTVEDIVRKIEEDLKRVVDKLRKLVKESEKKLTDSVKALRDVVRDIERLLRELVDKARKNVRTDELREVVERLEKLLRDALRVIKRIVDELERLNREYLTDVKEIVKRLAELLDDILRVVREIARDEDEETVERKLKKLLDKARTELEKIKRRLDKLNEDYERKLRELEKRLRDLLERLRKTLEDIRK

SEQ ID NO: 13777 - protein, 254 aa, Artificial Sequence; identical to SEQ ID NO: 13776
  Synthetic

SEQ ID NO: 13778 - protein, 242 aa, Artificial Sequence
  Synthetic
SEIEKILEELKRLVERVLKLNEDIARRIAELVKKDLKLIEDLLRELEDLVRKILDALRKKKDSKELVEEIKKRLDELLKRVREESDRVLKELKELLDEVRKVHEEIKEALERLLDKARKTIKDERILRLIEEIVKRLIELVEDNLRKWEELVKRHIELNEELLKRLEKVVEDIKRIIELVARGEEDKDKVVEEIRRLLKRLKEEAEKVARESEELLRRIREASKELAERAKDLLRKLDEAVR

SEQ ID NO: 13779 - protein, 242 aa, Artificial Sequence; identical to SEQ ID NO: 13778
  Synthetic

SEQ ID NO: 13780 - protein, 251 aa, Artificial Sequence
  Synthetic
SDEERILDTLRRIIEDLLRLLREALRRHEELLRRNIELIRRVLETIKEVLRRLLKLLLEVAKEEIKELKDALRKLLEELDKALKEYKKRIKDSLDELRKVIKRLEEELRRLLRELEEVRKKIEDRKTLIDTLKRVIDDIVKLLEDALRDLERVLDENMELSRRVVEILERVIEDVLRLLEEVVRRLKERRDREELDRLLEDVRRVIEELKKLVREVLERSERMVKEVRDLWRDLKRRIEEAAERIKDELRR

SEQ ID NO: 13781 - protein, 251 aa, Artificial Sequence; identical to SEQ ID NO: 13780
  Synthetic

SEQ ID NO: 13782 - protein, 239 aa, Artificial Sequence
  Synthetic
SERELLEKVRKVAEENIRILEEVLRKIAEVVKEDLKLLKELLEATERVVEELLKRIVEKKKREPEEAIRRLRKLLKELREEMERVKKESKRLLEELERILRRAKEKTEELLKRLRELLEAGLPRKDLAETLLRVVEAHAKLLRDVARVLLKLLEDHIRLSRELARRTEEVLKRIAKILREESEDETLERLLEELERLVKEVVERSERLLKKLLEDVRRVAEELVKSVEDLLKDIEREVT

SEQ ID NO: 13783 - protein, 239 aa, Artificial Sequence; identical to SEQ ID NO: 13782
  Synthetic

SEQ ID NO: 13784 - protein, 232 aa, Artificial Sequence
  Synthetic
REKELVDDIRRILEEILRLLRRLLEEVIRLLEENEKLVRRHLKTVIDILRRVAKLLDENGIRTDEADRVLERLEKAHRELLEDYKRALEKIKETLERVLREAEEVVKKIDDALRKLGGSKEVLKRLLEELLRLVEKIAEEIKRLLKELVRVTEELVRTNKELLEEAVRVIRKEVEDDSLVREVEELIKRLEKHIDDLLKTSRDLVKRVLDLVDEVVKRVEDLVERVKEKIDT

SEQ ID NO: 13785 - protein, 232 aa, Artificial Sequence; identical to SEQ ID NO: 13784
  Synthetic

SEQ ID NO: 13786 - protein, 247 aa, Artificial Sequence
  Synthetic
DEERLAEELERVLDRNRKLLEEALRELRRVIEENRKSVKRLLDELKRVLDELLKVLRELSRDDKDEKLRKVIEDLIRKLTKVLDKVRRLVEENIERLRRVLEKLERLARENLEDLKKVLDDVDKKLKDRRLVERLAELVRELIEVNKEILEMLKEIVRELLEINRTLLERLKDLVRTALEIIKLLARGDITEEDVERAVKEIRDRLRKLLEDYERAVRRLEDKLRRVRERYEKVLKRIKDKLEETKR

SEQ ID NO: 13787 - protein, 247 aa, Artificial Sequence; identical to SEQ ID NO: 13786
  Synthetic

SEQ ID NO: 13788 - protein, 247 aa, Artificial Sequence
  Synthetic
SREEVLRELEEVIEDNRRLLEELIEKSKKVLDESLKLIDELLRRLEEVLERVLRLLEELSKLDDEETLRRIVTKIRKELEDVLDEVRRIVKEILDRDRRVAEDLKRVVDENLEKLKKVLDELDKKLKDRRLVEILRDIVRLLIEINERALRELLKLHEEHTRIVAELLRELERVVEELRRLVELIARGEIREDDLKRVVDEVEKKLRELKRRYKEALERIKEKIKELKDRYERAVREVVAELRKTTK

SEQ ID NO: 13789 - protein, 247 aa, Artificial Sequence; identical to SEQ ID NO: 13788
  Synthetic

SEQ ID NO: 13790 - protein, 230 aa, Artificial Sequence
  Synthetic
KKDEEIREKLDRLLEENRRALEEITTRLDDLLRRNKDALRKVMEKLKRLLDDLRRADIREELLKRIADVIRDIMRLLKELHDHTAEVIKTIKKLLKELHDINKEIIERLKRLKDNNVPKEELLKRVEELVRTSLRLTTEVLKTVEKLIRDDKRLSEEILKRVKELIEELKRRVDIERVKEILERILRVVEEAVRLNEESLRRILDVVRKAVKLDRESLKKILDVVEEAVR

SEQ ID NO: 13791 - protein, 230 aa, Artificial Sequence; identical to SEQ ID NO: 13790
  Synthetic

SEQ ID NO: 13792 - protein, 243 aa, Artificial Sequence
  Synthetic
SRVEELKKLIEDILRISREVVERIKRVAEDIHRINRRVLDDLRKLIEDILRTVEEILARKVKDTEMAERLRDTIRRVVDEIRKLLEEHEKRSRELLEEIRKLLEDILRRSERAVEEIRELLKKNVRTKDVLRIIEEILREHLELLERVVRRIEEILRELLKTIEEIVKRIKEILEELKEVLKRGRVKDDEVEREIRRVKEDLDRILEEYRRLLEEIKRKLEEILRRVEELHRRLRRKLEEIDR

SEQ ID NO: 13793 - protein, 243 aa, Artificial Sequence; identical to SEQ ID NO: 13792
  Synthetic

SEQ ID NO: 13794 - protein, 244 aa, Artificial Sequence
  Synthetic
SRVEKVLELLKRIIEILRELVKVHLDVLRHNDELLKRIVEDLKRLVKKLVDILKEIVEKRKGEELDEIVRRLAKKLDEIIKTLKRLVDELARRNKESIDTLRRLVERLEERLREIVKLLKKLEEEGVDEETLKRLIETILRDIERVVRELKEIMDRINDENRRVVETLVKIVDDLLKDVEDVVRRANVDEEALERLKRLLEEIRERLEELKKRLEESLKRHEEEVRKLLDKLRRLLRRAEEEAR

SEQ ID NO: 13795 - protein, 244 aa, Artificial Sequence; identical to SEQ ID NO: 13794
  Synthetic

SEQ ID NO: 13796 - protein, 232 aa, Artificial Sequence
  Synthetic
SKEDELRKVLETLERLARELEELNKKILDDLKKLIEELRRHTEEVMRRLKELADELRKKPTSEDLERILRRLEELLEEHKDDLEKITETLERLVKKHNDLNKEVLDKLRRLLEKAKKDRTGREVLKELDEIIKEWRRLLEESIRELREIIKEIKKRLDDSIRKFEKMVEDVERSGAGEEVVRVLEELLRLVRDNVRRLDEILKELLRLVEESVRTAEEILKELLRLIKELAR

SEQ ID NO: 13797 - protein, 232 aa, Artificial Sequence; identical to SEQ ID NO: 13796
  Synthetic

SEQ ID NO: 13798 - protein, 237 aa, Artificial Sequence
  Synthetic
SIEELVDELLKVLKEVVEETAKLLEENNRRLKKITDDVRRLNEDTIRRLREVVKELETKRDERDVVRRIIEKLKKVVDDYRRVIEELIKRNEEVAEESRKVSEKLLKELEDLLRDIEKKVKSREKVRMLKRLIEELIRLNKELADIDVEINKKVSEVLRRNLEKVVEIAKRVLDVIRRDTDDDKARKALEDLERELRDVDRRSDEEATRLHEEHKKALDRYVKELKRVLDKMKEDTR

SEQ ID NO: 13799 - protein, 237 aa, Artificial Sequence; identical to SEQ ID NO: 13798
  Synthetic

SEQ ID NO: 13800 - protein, 237 aa, Artificial Sequence
  Synthetic
SEKELVDKLIKLLEDVVKKLEDIARDNNRILKEIADRVKELNERTVEEIKRVIEELRRKKDDREVVKKILEDIERVLREYEREIEKLIKRNDDVARKSEEDVRRLLEEVKKVLDEISKDLKDERLVKALADVIRKAIELLKRLLDKDVKINEEVSRILKENLDEVRKIVEELLKLIERDTDEEKLTRAAEDLLRKLRRVDEESDKKLREVHRKHKEALEEVKRRLKEITEEADRATR

SEQ ID NO: 13801 - protein, 237 aa, Artificial Sequence; identical to SEQ ID NO: 13800
  Synthetic

SEQ ID NO: 13802 - protein, 240 aa, Artificial Sequence
  Synthetic
SESELIRELEKLVKEIVDELERLLRNNIRLLEEVAKTLIRLLENNIELLDEILRELERLSKENRPDDEVRRTVEELLRRSREHSREVKETVEELLRRLERHSEEVRKTVEKLLTDLRRVVERNNQEDLRKLVDDIERVLRELLEVNRRANKKAKEVLEELLEVNDRANRKVERLLEVLLRGEVSEEEVRRTIERLKEEHEDALRRLKEILEELKDEHRRVLKRVKDKLRELKRRLEEREK

SEQ ID NO: 13803 - protein, 240 aa, Artificial Sequence; identical to SEQ ID NO: 13802
  Synthetic

SEQ ID NO: 13804 - protein, 228 aa, Artificial Sequence
  Synthetic
SEREELERLLKELEDVTREVVERLKKLLRDNEKLTDEVRKRLRDLLRRLEEMVRRRGLSDEVLKDLKRLIEELLKTVEELLREHIRSVEELLKAIRKLLEDHIRLIKELVRRADQRDETLERVDRKLEEDHRRILRRLEKVVEELKKEHERILRELEKVVDKVKKDLERVRREEEIEEIVKRLVEVLEKVLRELERASRKLVKVVEEVLRALEEISKELVDVVREVLR

SEQ ID NO: 13805 - protein, 228 aa, Artificial Sequence; identical to SEQ ID NO: 13804
  Synthetic

SEQ ID NO: 13806 - protein, 244 aa, Artificial Sequence
  Synthetic
DEDRRLEDAVRKLRKEHKDIMKKLDDIMRELDEDHRRIKERLDRILEELKKLLTRVLRETREDELLRKVLELLTRLLKLLADVLEENKRLLEDILRLLKELIETNLRLLEEILRLLRKVRREPVSEEEAKRLVEEITRLLERSTEEARKLVETIKRLLEESLDKLRRLVEEIERRLRTVLEEIRRRGAPEEIERIIRRVIEVIREILDLVRKVNKKALRVIEEILEDLARVNKKAVDAIDELRK

SEQ ID NO: 13807 - protein, 244 aa, Artificial Sequence; identical to SEQ ID NO: 13806
  Synthetic

SEQ ID NO: 13808 - protein, 244 aa, Artificial Sequence
  Synthetic
DEERLLKTILDVIRKVLKESKDILRRVEEILRRVIETAKEIHKEVKEIIEDVLRLLRENDKLEELVREVAKRLKEVIDRWREVVERVAETLKRVLEEHEEVVRRVARELEELLKRLREGEKLRAIEEVVKKVVRALEELSKELEKIVRTIVKLLRENVRRLEEILRRVVKLLRELVKLAKERSREEEIEKRVREIKKEVEDLLRRSEELLKELLDRIRKLLEELKKRHEDLLREVKKDLDEIRR

SEQ ID NO: 13809 - protein, 244 aa, Artificial Sequence; identical to SEQ ID NO: 13808
  Synthetic

SEQ ID NO: 13810 - protein, 240 aa, Artificial Sequence
  Synthetic
DEVEELLKRVRELLKRSEELVRKILEDVKRLLERSIEEVEDLLRKVEELLKRLLDLVERRKLLEEILRELVRLLKEIVRKVLELNRKLVEDVIRIAKRLLELNKESVKEWDRILKLLRDGTVDKKELLKDAEEALEKYERAVREILKELEEIIKEYVRRVEELLKELKDAVDKAKDEVRKEGSDEDLDRDVDRVLKEIMDLLRDLVRRTKELLEELLRLLEELVRRHKELVRKILDEIRK

SEQ ID NO: 13811 - protein, 240 aa, Artificial Sequence; identical to SEQ ID NO: 13810
  Synthetic

SEQ ID NO: 13812 - protein, 247 aa, Artificial Sequence
  Synthetic
REAEELLRELEELLKKSEKVLEDLLRKNRELIKDSKRRLDEVRRKVEKLAEEVEEVIRRGVSEEELIRVIKKVLDDLRRIIKELIEVSRKYLRTTLELVKELLDVSRDVLREVLRIIKALLDTIAKDNKEEKIKEIADVADEIRKLAEEDIRLIKKLLEESAKLVDEDVRKLEEIAKEITELVERLRRTTDKDAVRKLIEELKKLLEDLVEHHERLLKEDHERLKRLLDHHRELLKTVLTILRETAK

SEQ ID NO: 13813 - protein, 247 aa, Artificial Sequence; identical to SEQ ID NO: 13812
  Synthetic

SEQ ID NO: 13814 - protein, 238 aa, Artificial Sequence
  Synthetic
ELDEILRKVVEDSRRLVKELEDILREVIERTERILEEHRDLTRKADEDIRRILEEATRTKTDDELRERLKRLLDETAKLHRDVKKRLEDLNRDLLRLEDEILRRLEELNRRLEEVLRKKNKVSEKILKEHRELLEESRKRLEEIKKEHREMLKRSEDESRKILRDLEELVKEIDDKEDKKPKEEVLKDIVRVLRDVLKKANDLLKTHLDLNRESVKKVVEIARRHVKMNEDSVRKVEK

SEQ ID NO: 13815 - protein, 238 aa, Artificial Sequence; identical to SEQ ID NO: 13814
  Synthetic

SEQ ID NO: 13816 - protein, 238 aa, Artificial Sequence
  Synthetic
DVEDVLREVVERSRRLVEEHKRISEKVIRDTKRILDEHRELTERVIRRAKKLVDDARRTKTDEEVLKRFADLVRELLELHRRVKKKLDELNERLLRAHRTLLERLERLNRELLKLLRERNKVSEEIIRKHEELLKKSRRESEELIKAHETMLEESERRSKKILDEVERLLREIEKKARKKPKEEVLKDAVRVLEEILRKLNELLERHLKLNEESLERMNRILTRHVKLNKESADDARR

SEQ ID NO: 13817 - protein, 238 aa, Artificial Sequence; identical to SEQ ID NO: 13816
  Synthetic

SEQ ID NO: 13818 - protein, 245 aa, Artificial Sequence
  Synthetic
DEEELLRRVTEELKRLLDEARKLHEDVKRELEKLLKENDDLLRDVKRKLERLLEALKRGELTEDEVIERILRLVEELLKRHAETVERILKLVRDLLRLHEKLVKEILDLLTRLLELLERRKGEENREKVDKLKKLAKKVVDEVERSLEELRRLVEEVIKRIRDSLRRSARIVKEAVRELRELLRDVRDKDKLLERIRRLLETLLEVLKRDNEEIKRILEELLRVAEENLRRIKEIIDRLLDATRR

SEQ ID NO: 13819 - protein, 245 aa, Artificial Sequence; identical to SEQ ID NO: 13818
  Synthetic

SEQ ID NO: 13820 - protein, 249 aa, Artificial Sequence
  Synthetic
DEEEVVKRLADVLRENDETIRKVVEDLVRIAEENDRLWKKLVEDIAEILRRIVELLRRGGVPEELLDRLRKVVKRIVEKAEKILERLNRVSKAIAEKLKTIVDELNEVSKEIVKRAEDILRKVKDKETVLRKLRTLVKEYADLSKEVLERVERIVREYVKLSDEVVKSLREIVEELIRIIEDLLRKVNLDEDVKRALEELVKRLRKLLEDVKKKSEDIVREVERIVRELKKRSDEILKKLEDIVEKLRE

SEQ ID NO: 13821 - protein, 249 aa, Artificial Sequence; identical to SEQ ID NO: 13820
  Synthetic

SEQ ID NO: 13822 - protein, 240 aa, Artificial Sequence
  Synthetic
KEREEIRERVKRILETSRKLLEELAKAVEDVLRRSKELIDELRDAVRRVLEELERGGLEEELRRILEEVARILERLIRALEDLNRRAAEILRTLIDLAKKLHDELKRVIEELDKKPKSRELVEEAKRAVERYKRVVEELLDRLREAVERLRRAHEELLRDAARVVKELVDKLREVLKRVDEDRTKKIVERIIELIEELLRLLVKVVEDSVRLIEELLKLAEEVAKRSLKLIEDLLRAIEK

SEQ ID NO: 13823 - protein, 240 aa, Artificial Sequence; identical to SEQ ID NO: 13822
  Synthetic

SEQ ID NO: 13824 - protein, 247 aa, Artificial Sequence
  Synthetic
SDDEVIEKVKEDLRRLIKEAEDVVREYEKRLREVEKKLDEVVKESERLLRELLKKLEAGEKDVREIVRELLEVNKDVLRKVVEIVKELKKIDEDLLRKVEDIVRKLLEVIDEALRRVIESKKDVDRVRKIVEELRRKAEDVLRRIRELVRDLERISDETLERVKKLVKESEDLAREALDRIEKVNTDKKELIKILRDLARKHRELLKRLKELTREHLKRVREILEELLRVTRELVEEIDKILKDLKK

SEQ ID NO: 13825 - protein, 247 aa, Artificial Sequence; identical to SEQ ID NO: 13824
  Synthetic

SEQ ID NO: 13826 - protein, 240 aa, Artificial Sequence
  Synthetic
SEDEVLERIRRALERVEDEHRKVLEKIVEDLKDVLEKHKRVLEEAKRDLERIKEDADKGVPIEELIDKLRRLLEKLIERVRRITELLKRIIEEVARMLKEITDELRRIAEEVVKDTPEDERLKEVRRELEELLKENDKLIKDLVKEAEDLLDEDRKLISKVLRDLERLIEDLRDRLRDSDEKSLKDLLREVLERSKKLLEEHHKHLEEIVRRTKELLERHHRHLKEIIRRIEEILKRERD

SEQ ID NO: 13827 - protein, 240 aa, Artificial Sequence; identical to SEQ ID NO: 13826
  Synthetic

SEQ ID NO: 13828 - protein, 237 aa, Artificial Sequence
  Synthetic
SKEDELREVLERVKRLIETVKRALDEALDRTRRLIEELDKTSKRVLTTVKKLIEDARREDKRELLKKLAELIEEHLRTLEELLRRNKDLLREILELLEELLKELKRLLKELLENQERDEEVKRVLDRIRRLLDEVRKDLERLVEEVRKLHKEIEDRLRELTKRTRELLDKIRRLLEEGVDERDLLRELLRIVKEHVDEVRKLLDELRKVNEKIVDAVRKILEKLLKIATDAIEETRK

SEQ ID NO: 13829 - protein, 237 aa, Artificial Sequence; identical to SEQ ID NO: 13828
  Synthetic

SEQ ID NO: 13830 - protein, 251 aa, Artificial Sequence
  Synthetic
SEKERLMEEIKRVAEELRKTVDRLRERNEKVVRDIRETVREVEREHEDVVKELADRVRELRRTDALERLVKLLLDIIKRLVEESRKLVELVLKIIEDNVRALTELVKRLLRIIEELLRVLRDVEGKEELDKVKKKVRDELKKVEEEAERILRESERLLREVEDTVRRIHEEVERKLREVEKRIEDSNLSEEVREVLRRLTKILRDLLKRNKEIMEKLLRDLKELLKENKKALEDLLRKLEELLRRIAEAEK

SEQ ID NO: 13831 - protein, 251 aa, Artificial Sequence; identical to SEQ ID NO: 13830
  Synthetic

SEQ ID NO: 13832 - protein, 240 aa, Artificial Sequence
  Synthetic
SKEETTKRLLDRHLERDRELLDRAARTNEEILRRNREVLKELFELLKRILDRVREANLIKRELLREAEERVKEILKEVDDINEEYKRELERILDEVDKRNEETKRLLEEIVDELRRTGTTEEVIRKVLEVVRRNLEVHRKLLEDSIRLIRRLLEVTRELLERLIEVIERLLRALLEDKKELEEVLRELRELLKRLKKRLEELLREHEKLLEDYKDRLRKSDDDLRRSVEEIKKALDRLRK

SEQ ID NO: 13833 - protein, 240 aa, Artificial Sequence; identical to SEQ ID NO: 13832
  Synthetic

SEQ ID NO: 13834 - protein, 240 aa, Artificial Sequence
  Synthetic
SKLEDSAEKLKEHLKRDRELLKRAEDLLREILRRNREVLDELRRTLDDILRRIREENLIKKEALDEVKKEIEEVLRKADRANEKIKKAVEDIVRKAEEANRDTEEKVRRILEEVKRRGTTDEIVRALLRVLEENLRVHKELLEELLRVVKELVDLTRDLLRRLIEIIEKLLRLLKEDVKEAKEVLDRLEKLLRDARKRLKELLDEHEKVLEDMERRLRESLDDLRRSLDRIRKDLKRKTD

SEQ ID NO: 13835 - protein, 240 aa, Artificial Sequence; identical to SEQ ID NO: 13834
  Synthetic

SEQ ID NO: 13836 - protein, 243 aa, Artificial Sequence
  Synthetic
SEKERTKELLERLLKLIRELLKKLEDLNRDLLRRVKEVLDRLAELNEELLRRVEEVTRLRDEVDKDELTRRLREIIRRYEEELERIVRELERILTEYEEMVRRLLREIEELIDRVKKELDKLPRTEILEKVKKVIEKILDSIRKVIKASLESAKELLDELRRVAKASVRLVRELLRIAEEVKEKEKLTKLIKEIKERSKRLLEEVKRALEEVMKKNEKILRDVRDDLRRAREELREILREADD

SEQ ID NO: 13837 - protein, 243 aa, Artificial Sequence; identical to SEQ ID NO: 13836
  Synthetic

SEQ ID NO: 13838 - protein, 249 aa, Artificial Sequence
  Synthetic
REEEKLKETLERILRELEKLAKENKELLERILKRDEDLTRENKETLDRLLKRVEEVTRRKEDDDRLREILERIKEEVDRDVRKNEKILKDIEDEVREAVKRNETRLREIKRKVEELVKDLREKLKDVDRARRIVEELKKIIDKVLDDHRKMVRRLLEVIKKLLDLHRESVKKLKEVVKELLDILREVRGDREVEKVLRDIKRKIKEIVDEHRDMNRKIKEEIDRIDTEYKKSLKDIKKEIEEVLDEARQ

SEQ ID NO: 13839 - protein, 249 aa, Artificial Sequence; identical to SEQ ID NO: 13838
  Synthetic

SEQ ID NO: 13840 - protein, 240 aa, Artificial Sequence
  Synthetic
RKEEAIERIRREIEKVRRRLREVHKESEERIRRLEDEYRRALETSAELIRRILDELRKNRVREDDLRRDEELARKLEKLNKELLEALRRIVKKLEDLNREVEKSSEELVEELKRVLDSDLDRDELTEVAKRLKDKLKRILDELRRLHEELKEELERLLKRYAEVIEKLKEDLKRVLAEVTDKRVKDIVRKILRVIEENLKFVAEAVKKLKEIIERNLRLLEEIAKLLLDILEEVLKRLTT

SEQ ID NO: 13841 - protein, 240 aa, Artificial Sequence; identical to SEQ ID NO: 13840
  Synthetic

SEQ ID NO: 13842 - protein, 240 aa, Artificial Sequence
  Synthetic
REKEVIEDIKRLLDEILKRLEEANKETEERLEKLRKEYRELLEDSKRKIKDIEAELRRLNVPEEKLRLVRELVKRLEDLNRRLKKALEDIARRLRDLNRRVKELIKRLLEELKEVAESNLDREEVEKVIRDLIRRLEKILTDLDEVHERLKKDLEKLLEEYERTVRKLLKDLEEVLKRVDKEAVKEIVKRLKEVIKDNLRVVEELVRKLKEIIEDNLRVLREIAKLLKDVLEKLLRDVRK

SEQ ID NO: 13843 - protein, 240 aa, Artificial Sequence; identical to SEQ ID NO: 13842
  Synthetic

SEQ ID NO: 13844 - protein, 240 aa, Artificial Sequence
  Synthetic
DKDKRLEELLKRLKELNDKTFEELERILEELKRANERSLREAERILEELRRRIEERNLDKRLAELLKKLLDDLKRLLEEYTRTNEELLKRLRELLERYRETNKKLLDLLRKLLDEARRTKTDEDLLRRLEDILRKYEDEVRRLLKELEDILREYEDTSRRLLEELERIAKEAAERVSRIKDKDVKDIIRTILEVARDLLRLLEEDSRTNSEVVKRLLDLLREDSKANSEVVKRLLDVLRE

SEQ ID NO: 13845 - protein, 240 aa, Artificial Sequence; identical to SEQ ID NO: 13844
  Synthetic

SEQ ID NO: 13846 - protein, 240 aa, Artificial Sequence
  Synthetic
SKEETLKRLLDELEKRNRETVERLERLLKELEDRNRRSLEELERVLEELERKIEESNLEKELKDTLRRILEELRKLLEEYFRKNEELLRLLRKLLDEYRRTNEELLRLLEELLDTARRTRNDSELLKRLEDIAREYEKRVRRLLEKLKDILDKYRKTVEELVRKMEEILKEAKKTISRIERREVKDIVRKMEEVIRRLIEILRRDVELNLDVAKKLLELLKEDSKLNLDVARELLELLDR

SEQ ID NO: 13847 - protein, 240 aa, Artificial Sequence; identical to SEQ ID NO: 13846
  Synthetic

SEQ ID NO: 13848 - protein, 243 aa, Artificial Sequence
  Synthetic
RELELLDELLRRTERLVKEYLRVSKELLEETLKLLTELLKLSKRLLEETERLLRRDKLGDEEEIRRLIRRAEDSHRRLKEIIDRLFREAEESHRRLEDTIRKLKREAREVLKALERGERSLKEVLDVLDTLVKRLIKVLRDNNRRLEELLRRLVKVLEENARILEDLVRELIRAAREKLRDKSKTELLEEAVKRLETLLRRYKEEIRRVAKRLEELLRELNELSKRLEETLKKLLEDLREDAR

SEQ ID NO: 13849 - protein, 243 aa, Artificial Sequence; identical to SEQ ID NO: 13848
  Synthetic

SEQ ID NO: 13850 - protein, 243 aa, Artificial Sequence
  Synthetic
DEEETLRRLLERKVELAKEYLDVSKEVIDRTTKLLDEYLKTSKRIVDKTVELLERDDLGPKELIKRLKEELERSLRELEEEIKRLKRELEESLKKLKEIIDRLKEEAEKLLRVLKRGEKSEEEALRALAKLVRELIEVLRENDERLRDVLRRLIEALRKNNEILERVLRKLVRAAEERLRDKSLRERLEEARRRLEELLRELNEITKDLERKLEKLLRDLNELTKRLEEELKRLLDELKKRTD

SEQ ID NO: 13851 - protein, 243 aa, Artificial Sequence; identical to SEQ ID NO: 13850
  Synthetic

SEQ ID NO: 13852 - protein, 247 aa, Artificial Sequence
  Synthetic
SEEDELVKRLRELVKELIDAIREHLRRLEELLRELLKALEDHLRKLAELVRRIIEELRRTNAVDDKLLETLDRIVKRVAEEHKRLNEELERIARKVAEESRRLLEELERIVRKVETDIKDLKDKGGDKDAIARLVKELADVARRVVTEHARLVRELARAIKEVVKAHVELVERLLEVIKEVIDRGDVPEELKERIRRIVETIRRSLERLKEEADRIVKEIEKSLRELEERLERIVDTIRKLLEDAKR

SEQ ID NO: 13853 - protein, 247 aa, Artificial Sequence; identical to SEQ ID NO: 13852
  Synthetic

SEQ ID NO: 13854 - protein, 251 aa, Artificial Sequence
  Synthetic
SEDDVLRKLLEAIKKLLKETKEILDRYLRESDRHNKALREILERLLELIKTLLEDLVRRTGKVKDLDKLAEDVKRVRKRLEEILEDNKRKSEEIARRLDKILDEIRKRVEDVVRELERITREVKDKDTLVREVVRLLEELLEVARRVVKRLEDLVRENNRVNNEVTERLVELLKRLLELTDDLLRKLRKDVPEEALKEIKRKLRELEKEIRKVVEDSRRISEESLRRLEKALEDIERILKKLSDEIRTDAT

SEQ ID NO: 13855 - protein, 251 aa, Artificial Sequence; identical to SEQ ID NO: 13854
  Synthetic

SEQ ID NO: 13856 - protein, 233 aa, Artificial Sequence
  Synthetic
DEEEVTKEVERLNRELLKRLREIVEETKDLNRRLLEILEELVRRTEKLLKDVLEIRKRGEKDERVLRDLKRTVEELIKRAKDALERYERDLRRIEERLKKLLDDYRKVLEDITRALPRDEKVERLVRLLERSLEVIEELIRLIVKILRDSLRVVKELIDRIVRIMERILELLRKEKDKDRLREELKKLLEELRRVLEDAKRKSEELSRRLEEVLRRAEEKNKEIMDRIRKARE

SEQ ID NO: 13857 - protein, 233 aa, Artificial Sequence; identical to SEQ ID NO: 13856
  Synthetic

SEQ ID NO: 13858 - protein, 235 aa, Artificial Sequence
  Synthetic
KEKEELLEEVERKVTELKKRSEDLVRKLDEEVKRLEREHEELLKKLRDAVEELRRAKLEIDDLERTTRELTREHEETLRKSLRELERLLEDHVRTIEKVLKDLRKILEDVAKKTRDDERLKELTKRLEEAAERLRRDHERLLRDLERVMRELKKLHEDARRELERVVREVKEEEDRETVLRKIIRLVEELLKILARINEEVKKLIRKLLEILTRINKKMIEVIDELVKIIREAAT

SEQ ID NO: 13859 - protein, 235 aa, Artificial Sequence; identical to SEQ ID NO: 13858
  Synthetic

SEQ ID NO: 13860 - protein, 243 aa, Artificial Sequence
  Synthetic
SEEERTKESLKKVLKALVDLNRELLRKLEENMRELTKLNEEVKRKLKEVLDKVRENGIVDKDAEREAERLMRELDKSSEDTKRETRKLIEESKKSTRRTEEEARKLTETLDRLKEAGLPREDLLRALVRLLEELARLIEEDVRRNAELVKRHIELVERDVRELLRLIKELVDLLRDLAEKLRRTEEIRKIVEEILKEIKELADRYREEVRKSKDKLRRILEDYKRKVDELKERLRELIEEVET

SEQ ID NO: 13861 - protein, 243 aa, Artificial Sequence; identical to SEQ ID NO: 13860
  Synthetic

SEQ ID NO: 13862 - protein, 239 aa, Artificial Sequence
  Synthetic
SLKELAEEVLRRILELLRRIIEIHERSLERSNRTLKKLIDEIERVMREILETLKRALSIKDKEKLKEVRDRLRELLTELLRRAEEIAKENERLLRENKKRLKKIAEELRKLLEDLKRRLSGGPDKLERILREETKLLEDILRRIEEVVKEHEKLNREVLKRLKEILDRTRELLKKLADEDSRDRTLLEEIRRRVEKVIREARETLREHRERVERSIEELRRMLEDVERIVREAIERLRR

SEQ ID NO: 13863 - protein, 239 aa, Artificial Sequence; identical to SEQ ID NO: 13862
  Synthetic

SEQ ID NO: 13864 - protein, 239 aa, Artificial Sequence
  Synthetic
SEVEDILRRLAELNKRLIDKLRELIDRIRRLNEELLRVVEDILRRLKRLADELIRVVRERGDIPEELLRKLEEELKKIVDELRRLVEEYEKALRDLIKELRKAVEEYRRTLAELVERLRRLEEPEELLKDLAEDVRRNIKAVEEVIRRFEKNVEDNIEVVRRLVDALEKLVRRLEKVLRDKLRDEDLKRLLEKLKEDVERVLKEVRDRTRESLKHLEDVIRELEKKTEDSLRHMEERRK

SEQ ID NO: 13865 - protein, 239 aa, Artificial Sequence; identical to SEQ ID NO: 13864
  Synthetic

SEQ ID NO: 13866 - protein, 239 aa, Artificial Sequence
  Synthetic
SKEELVKEALEENVRSVEEVIKLLKDALDENLKVVERVIRELKRALERVKDVIRKLIEQRELLRRAEEELDRLEEELKRILDEYRKRVREIKEKLKKLLEDIRRVHEELERRLRREGPAERLLKELKELNKRIREMTERINREVRELNRALLEKIEDLVRRLVELLERVKERLKDNGRLDKKVADELKKLLDELKKILEEIRRMLEEANRKHDDIVRDIRRVLEENDRKLEKIADDIRR

SEQ ID NO: 13867 - protein, 239 aa, Artificial Sequence; identical to SEQ ID NO: 13866
  Synthetic

SEQ ID NO: 13868 - protein, 239 aa, Artificial Sequence
  Synthetic
SKKEELEKLLDTNLTEIRRLLKRVKDVLDRNLEVVRRVIEELARLLDEVTEVVRRLIDDEKLLREVEKVAEDIKRELERILREYEKLVEDIKRELKRLLEELERAHREIKKEVERDGPDDRVLKKLKELNDDLLRAIKEINDKVKKLNEDLRKKIEKIAREVLKLIEDVKRKLKEKGRLDEKVKRELEKLIKRVKDILDDIRRRLKKVNEEHEREADRLRRELERLDRELKKRMDDIRR

SEQ ID NO: 13869 - protein, 239 aa, Artificial Sequence; identical to SEQ ID NO: 13868
  Synthetic

SEQ ID NO: 13870 - protein, 236 aa, Artificial Sequence
  Synthetic
DEDEELKERTKKSLEKLRRLLERLEKIIRESLDKLRDLLRLLEEALKRILDELRRNNVVSKDLLTELKKLLDRLREEVKRLLEESKELVKELKKRVDELLTESREAVKDLERKVRREEGEEKLLRLVKRLLERHLELSDRIARLVVKILEDNLRLIDELVKIIKELLERVLEVVRRVVRDRDKLEKIERDIRKIIRDLEEIARRLKEDHERVIKELRETVKKHKEDLEEVIRELRR

SEQ ID NO: 13871 - protein, 236 aa, Artificial Sequence; identical to SEQ ID NO: 13870
  Synthetic

SEQ ID NO: 13872 - protein, 234 aa, Artificial Sequence
  Synthetic
REKEDVARRIKRIHDELETRIRKLARDLERIHRKLKEDIERLVREAEKKLRELEKKTTDDKIKTLIDRTRKTLEDLTDEIRRLLKKHLEDLKRLLDDIERVLRRHLRKLKELLDVARRNEVPDKEVRDEIRKSSRELEDILRRLREKLKTLHEEVRRAVERVRKKIEDLEREVRREGVPEEIERLVEELKKILETILKLIAELNEEVVRLLEDILRLVRELNERVAELLERAEK

SEQ ID NO: 13873 - protein, 234 aa, Artificial Sequence; identical to SEQ ID NO: 13872
  Synthetic

SEQ ID NO: 13874 - protein, 243 aa, Artificial Sequence
  Synthetic
DEERIIKTLEDINKKLVEDIKRILDKVRELNERLADAIRKILEETKRILERTTRKVRKDGEISEELLRRLEEKLRKLLEDLERVLREHEDESRRILEEVERLLKRHKDRSKELLDRARDVKDRVKRDKELVDRLKKLIDDSLESVRELIERLKELLDRLVKSVEDLIRTIKELLDRLVEVLREVVSDKDTLRTVEKLVEDVKRRLDKLLEDYKRLIEEVKKELDKLLKEYEDRLREIKKRIDE

SEQ ID NO: 13875 - protein, 243 aa, Artificial Sequence; identical to SEQ ID NO: 13874
  Synthetic

SEQ ID NO: 13876 - protein, 244 aa, Artificial Sequence
  Synthetic
DLEDAIRELLRRLTELIEELVRILEELNKRLNDLVRRLVEILRRINELLKKLVDRLRKDPDASEDLKRVVEEARRLHREALERLKEVVRELRKLHDDARKRLEDVRRELEKRLEDVARRTREDEKLERLRKAIKDILDKLEELLRKHLEDVERILRELEELLERHKRMLEKLLKDLEDLLRRRVEERELKKVLDDIREKVKKTIKEIDEVLEKITRENERTRKEIEEMLRTLRELIKRLLEETK

SEQ ID NO: 13877 - protein, 244 aa, Artificial Sequence; identical to SEQ ID NO: 13876
  Synthetic

SEQ ID NO: 13878 - protein, 239 aa, Artificial Sequence
  Synthetic
SEEDEVAKTLEDILRRLEELLREHHELHRRILEELEKLLRDHIKLHKDILDEATKSTDDLEKLADEVRKKLRESLKTLKKIVEDIERKLEESKRRLKRTVEEIRKKLKELLERIETRNLDERLLRALRELVRLLEEILRRLLELLEEDVRLLKEILRELERLLREDIKLLEEILELLKRRPDSKETLKRLKDRSKELNDRVRETLKRLAERSKRLNEKVEEDVRRAVEELRRLLEEIRK

SEQ ID NO: 13879 - protein, 239 aa, Artificial Sequence; identical to SEQ ID NO: 13878
  Synthetic

SEQ ID NO: 13880 - protein, 227 aa, Artificial Sequence
  Synthetic
DERKVIEDLVEVLRDLLRVIKEVLDRNVKLIKDLLRLNLKVAEELIRVLKELLDRLRRDKDLRELEERIKRVLEEHEDVIRRAAEKVEKVADDSRKVIEDISRKVEALSRRNLEMDTLAELAKEILKLIEDLLRDHKRKTDRLLEELRELTKRTARKLEKILEDIVRKTGETEELDRIRKELKRLLDELTKLHEDVRKKSEELVREAERTLEDVKRKLDELLERAKK

SEQ ID NO: 13881 - protein, 227 aa, Artificial Sequence; identical to SEQ ID NO: 13880
  Synthetic

SEQ ID NO: 13882 - protein, 244 aa, Artificial Sequence
  Synthetic
DEERELERLLEDVRRRHEELLRRLEKLLEDIRKLYEDVRRKLKRLLERVDRLVREILRRDKRDKVREVIKELLEVLRRVVERIEELIEESLRVDERVVEEIKKLIEEHLRVLEEAVDRIKKKKDDEETMREIIRELEEVNRRLDEEVKRLKRENDEVLRRVKEALKRLAEELREALKRLEERTGRDELIKELADIVKEILRLAEELAKELEKINRELDRVTRELIKDLLRISRELIKRLEDTTR

SEQ ID NO: 13883 - protein, 244 aa, Artificial Sequence; identical to SEQ ID NO: 13882
  Synthetic

SEQ ID NO: 13884 - protein, 238 aa, Artificial Sequence
  Synthetic
SDKELLDDTIRKMRKLHRDSVELLDDIRRKLEELLRKVRELLDRNVKKIRELIELRKKTDERELKKRVDDIERENEEALRRIAEEIKEIKKKIDRAVKEYKTELRKLKEKLKDALRRVSDEKVKEVIRRLLEALDRNAELNEDVLRRILEMLERILETIKEIIKKNIKSLRELLELIARGSRDSDLEDLIRRDIEELKKVIEKLEELVRRIEELLREAKERDKESLDRIEDELRKAKK

SEQ ID NO: 13885 - protein, 238 aa, Artificial Sequence; identical to SEQ ID NO: 13884
  Synthetic

SEQ ID NO: 13886 - protein, 238 aa, Artificial Sequence
  Synthetic
EEDDLLKANLDTLRELHKESEKLLRDIEETAKELHKKSEELLKRITDELDRLVKLSRKVDDKVLEELIRRIVREIEKMVEDYERELRDLVRKIEDAVRRYEKKVREIEKRNKEFLKKVTDEKVKEVIERNLKTIRENVELNKEILRRIIEVLRENVRLNREVAKELIRVAEEILKLLRAGSRDSDIKRILDDLRRRLEDALRRDRETLKRLKEEIERVKKEDRRSLERDKEELEKARK

SEQ ID NO: 13887 - protein, 238 aa, Artificial Sequence; identical to SEQ ID NO: 13886
  Synthetic

SEQ ID NO: 13888 - protein, 235 aa, Artificial Sequence
  Synthetic
SAAELILKAAKEAAEANREAAELALKAAEESARAAREAAELALKAAKEAAEAARRGAEDKDTALKLVDEAVRKAEEALRRANEKNRRAVRKAEEAVKRAAEKNRRAVEKAKEAAERGRADEKKKRRLEELAKRTEDAIKRILEELKKLAEDSEEIDRRALKALKELADEAREIAKANLDKDDLTRAADELLKKAKKLADDYKRAADRLLKEAEDLAREWKKLADKALEDAKRDAD

SEQ ID NO: 13889 - protein, 235 aa, Artificial Sequence; identical to SEQ ID NO: 13888
  Synthetic

SEQ ID NO: 13890 - protein, 235 aa, Artificial Sequence
  Synthetic
KAEEAAKEAARLAKEDADLAKKAAEDAAELHERHAKLLEDSARTAAELAKRLAEAATVDEAARLLKKAAEDYKKAADEAARLNREAAKEAEKAARDAAKLNREAAEDVKRAAKDRLREAVERAKEALKRSLDLAKEAVERSKEALKRSVELNARAVEIAKEALKEALRIAAERAERKEDLDRLAKIAKEAADALEELLERSKESAERAARALEKLLKEWADSAKKAADALEELDR

SEQ ID NO: 13891 - protein, 235 aa, Artificial Sequence; identical to SEQ ID NO: 13890
  Synthetic

SEQ ID NO: 13892 - protein, 237 aa, Artificial Sequence
  Synthetic
DELETLKKEAEDVLRELRDILRKLEDLSRKTIEDMRRIVEEVLKLNEDSIRELKRIIEELDSKDLMDTVEKVVKRNLEIAERVIERLLELVRRNADIARRVIEELLKVLERLADIVRKRIKSEVLREIKRVAEEVLKKVREVLKRHEDAIRKVLERVRDVAREHRRVVKEVLEDVKRAGGLTDEVVKKLEDVSRKSIDDLRKIIETLREVVERSIEEIERIIRDLERVIREIIEREK

SEQ ID NO: 13893 - protein, 237 aa, Artificial Sequence; identical to SEQ ID NO: 13892
  Synthetic

SEQ ID NO: 13894 - protein, 240 aa, Artificial Sequence
  Synthetic
SKIEELAKIAEEHAELNRRAARKNNEIAKEAAELWKRAAEKHVRIAERAADAIRKAAKSEAAKTALKLIKENAEDAKEAARRALELAKESAERNTRAAEEADKLSKDAARTAREARREDALKKAADKAAEASRRAVELNKKAAEDHHRANETAARLAERASRHLIEALERAVRAAARELEDEKALREAKELAERAARENREALKEAKELAKRNSEKAKESAKEHKKLAEDANKRAEEATR

SEQ ID NO: 13895 - protein, 240 aa, Artificial Sequence; identical to SEQ ID NO: 13894
  Synthetic

SEQ ID NO: 13896 - protein, 240 aa, Artificial Sequence
  Synthetic
DEEEVIEEILKTLEEINRRVLKLIKDILEKVKRVDDEIKTLVKEVLRENERVLREVREKAKVKDLVKELLKRVREVAKIHREIVRRHLEILERILEEVAKVVEEHIDALRRILELLERVIRDEEVVKEVRKLVEDVLRASREVLERVTRLAEELIRESKRVLDTSRKLIEEIEDRLRKVRSEKMLEDILRRLEEINRTSLRLVDEVSKKTREVLERILKLVKEVLDESRRVAKKVKDDLK

SEQ ID NO: 13897 - protein, 240 aa, Artificial Sequence; identical to SEQ ID NO: 13896
  Synthetic

SEQ ID NO: 13898 - protein, 229 aa, Artificial Sequence
  Synthetic
SAVDIAREAARRVIELLKRSAEAAEEAARRSIKLAKESADAAREAAKKVIEILKRAADEDRALKEIEDLARELRKASKEVLEEDERLARELEEISRRVLDEIRRLAKELEDKATKKKAEKAAREIERAAKEHLEVNKRAAKRSKDATERHLEANDEAAKRIRDAADEVRKRGEEDAARKAAEIAARAAKRSADTAKRWAEVAKEAAEESAKSAKKAAKIAEDAAREIEK

SEQ ID NO: 13899 - protein, 229 aa, Artificial Sequence; identical to SEQ ID NO: 13898
  Synthetic

SEQ ID NO: 13900 - protein, 231 aa, Artificial Sequence
  Synthetic
DLREAAKEAIDAAEEAARRTEEAAKENIRALEEAAKRTRDAVRRAIKAIEDAVRDAGSTDEAVKIVEDAARDALRASKESIDIVREAAKRSLDASRESIKIVEDAAKKAEDAARKAGRDASRAAELAKRAAEADKRAAEEDARLNEEAARADRRVAEELARLAEEVADAAKKADKREDLERIAREAAERAKELADRLEEIYRRAAEESKRLAEELKRIYKRAAEEAKKAAD

SEQ ID NO: 13901 - protein, 231 aa, Artificial Sequence; identical to SEQ ID NO: 13900
  Synthetic

SEQ ID NO: 13902 - protein, 242 aa, Artificial Sequence
  Synthetic
SKIEELMKLVEKIIRKTLDLVRKHAEVSKEVLKEYIRISKEHLDVSKRVAEELKKEIEVKRLLEEVERVAKKVVETNKRNIETVERVLEDIKRTNTELLKRIEDVLREAVRVAEVLRRGDSDKEEVVRRIKELLKELLKVIREVVEKDKRLLDELLKSNADVVRTDEELLRRLLRVVERDVERKEDLDRIRDTLRRVIERSKRIHDRLREMLEEVKRRSEEIVERIERELRDVARKLEETLR

SEQ ID NO: 13903 - protein, 242 aa, Artificial Sequence; identical to SEQ ID NO: 13902
  Synthetic

SEQ ID NO: 13904 - protein, 243 aa, Artificial Sequence
  Synthetic
SLTEELRRVVKEIEEVVRRDVRTLEEVVKKITEVVRRDDKSLREVVKRNEELVRLLARGDRRDEDVLRAVAKSNKELLDSSREVLKTVADLLRRLLESSKRVADRVEELARRLLKMVKDSGKDDRKLREKLKKILREYRERLKEVAKKIRDALKRYEDILREIEKKNRDVLKRAEELRSKDTSEKDRREILRELVELTERSVEEIARVNKELVDIVRELVKELKRLNERLVELVKRLVEETAT

SEQ ID NO: 13905 - protein, 243 aa, Artificial Sequence; identical to SEQ ID NO: 13904
  Synthetic

SEQ ID NO: 13906 - protein, 241 aa, Artificial Sequence
  Synthetic
RAIETLVDVVREAIEINKRLVDRNVESNKELAKLNRDLVRRNRESNTELADLVRRDKDVDRLREEAKRVLEENKRLLDELRERHERVLKRNEDLLREVERLHTRILRDLREIVRRDNSRKEVLERLERVVRDILRSLKEVLDENAEVVKRILKSLEDALRENERVVREVLELLKRVRDQDREEELKRVVDEIVELLKRVLETTEKVVRDNVRLLEKALRSSKKVLDENVKKLEDVLRDLKR

SEQ ID NO: 13907 - protein, 241 aa, Artificial Sequence; identical to SEQ ID NO: 13906
  Synthetic

SEQ ID NO: 13908 - protein, 241 aa, Artificial Sequence
  Synthetic
SAAEALAKLAKENAELNRELAERNARSNKELAELNEEAARRNAKSNKELAELARRERDVDELRRRAEEALRRNKELLDKVRRDHERALRRNKKLAKEAEERHKKSLEDAKRIAKRDKAREEALRSAEEAVRRALKSLKDALRSNEEAVRRALKSLKEAADENEKAVKEALDLARRARDDDTEEELKRAIEEAAKLLKRAADETRRAAKENAEALEKAARESKEAAKDNAEALKKAAEEAKK

SEQ ID NO: 13909 - protein, 241 aa, Artificial Sequence; identical to SEQ ID NO: 13908
  Synthetic

SEQ ID NO: 13910 - protein, 232 aa, Artificial Sequence
  Synthetic
TEEEVVEDVKRVLDESHDDLRRLIETLTRVLRESLKRIKEALEELERVLKKLLDLLEGGRDKREVLDEIRKVLERLREVIEELLRINKEVLRELERVIRELLKKNEDLARRVRRDVKSRLLEVLERLARESLELNRRILEELRKLVEKSLRAVEKILKRLEEIVRKLLKLVEDNKPREEVKRVLEEARDELRRLLEEYKKIIEELERELERLLREHREVIRRIKEEIDKSSK

SEQ ID NO: 13911 - protein, 232 aa, Artificial Sequence; identical to SEQ ID NO: 13910
  Synthetic

SEQ ID NO: 13912 - protein, 234 aa, Artificial Sequence
  Synthetic
SEVERAVEDVKRALEENVRLSKELVDRVTKMAEDNVKLTKDIVDKVRRILEELVEVIERGGSDDTRRELIDKARRLLRKLRDELKESLDDARRLLEDIKRLIEESVKRLRDLLEKIRREKSLPEDLLRLLREVLEELKKINDELLDAVRRVLENSARVLETLLKLIEDVLRELERVTDKDEVRKIVRELVEEAKKVVEYDTENAKRVVEELKRVVKRDADVVRKLVELLDRKAR

SEQ ID NO: 13913 - protein, 234 aa, Artificial Sequence; identical to SEQ ID NO: 13912
  Synthetic

SEQ ID NO: 13914 - protein, 235 aa, Artificial Sequence
  Synthetic
SELEEAVKRVRDALRENLDSIRRLVEKIRRVLEEHNKLSKELVDRIEEVLRRTVEAVKKDKPEEDLRRDLERVLEELTRLVDEVRKTNERALTELEKLVRDDKRKLEEVLRELRERLVKIEELLRRLEEVIRRSLRSLEELLKLLERVSRELVEVLRELLELLRKVVKRLLDLLRKGSDKRDVARVVRELIELVKRVLERDKRIVDELVKLVDEVLKRNKEIVDELVRLVDEARR

SEQ ID NO: 13915 - protein, 235 aa, Artificial Sequence; identical to SEQ ID NO: 13914
  Synthetic

SEQ ID NO: 13916 - protein, 238 aa, Artificial Sequence
  Synthetic
SELEDLIRLLREVIKRLEESVKELVDIVEEAIERLRKIVKELIDLSRKVIDELLELGVEERVIKKAKEASEEALRKLEDVIRKLKKILEDVLKKLKESIDELLREVDELLKRPQDKEVLREILERLRELLRRHTKVLREVIKEIADALEEVLRVIEEILDLHRRLLDEIRKVLERAGLPEELLDRIRRLIEESIKKLARIADRLRKLIEDLRRLLEELLRRNEELIERLERMLDEKAR

SEQ ID NO: 13917 - protein, 238 aa, Artificial Sequence; identical to SEQ ID NO: 13916
  Synthetic

SEQ ID NO: 13918 - protein, 238 aa, Artificial Sequence
  Synthetic
SEKEEAAKAAEEAAEIAERADEKAARSSKEAAKIAEKADKEAAESTRKALDDARRALEEAPADTRARDLARKLAREAEESLKEHKKISEELKKRLDESLKEHREISERLKKELKELREADRDLDELARELERLAKEHADSLREHARRSRELAEEHVKSLKRHAEESEKLAERAAREASDEDAARRAEKAARENADSIRRAAEKSRKAAEDNARSIEKAARESEEAAERAARILKRAKD

SEQ ID NO: 13919 - protein, 238 aa, Artificial Sequence; identical to SEQ ID NO: 13918
  Synthetic

SEQ ID NO: 13920 - protein, 229 aa, Artificial Sequence
  Synthetic
KEVEDVVEKLRELIDRALDRNRKVVEEVRDVVRRALEENRKVVEEVRKVIKEILDRVDDETVRTVVELLERLLDEHLRIVEEIVRLLTDLLRRHLRVVEDIVRLLRELLKILTELRRREELEKIARRLLETIDRLIRTLERLYDEAREEIEKLIRELERLYREVDKRIKEAGLPKEATDLIRELIERLRKVLEKSRRLIDRLVKLSRDVLEETKRLVEELIREVKRAET

SEQ ID NO: 13921 - protein, 229 aa, Artificial Sequence; identical to SEQ ID NO: 13920
  Synthetic

SEQ ID NO: 13922 - protein, 240 aa, Artificial Sequence
  Synthetic
KLEEIVKKLEDLNKKAVEILRRVLEEHEKLVEKVKKVLRDVLRLLEKVVREVIETLKKKDTDEKVREALKELEEVVRKIKEEVEKVLKRLEEVSKRLKDEVRRVLKESEDVAKKIRRDVRRVRSKDAAKRATDLLKETLRILEEAIRRIVKVIEDSLEILREAVERIVRLLEELLKILARIGLDEEVLRKLKEIIKELKDRLKKLLDDYERIIDELRRELERVLREYEKILEDLRKELED

SEQ ID NO: 13923 - protein, 240 aa, Artificial Sequence; identical to SEQ ID NO: 13922
  Synthetic

SEQ ID NO: 13924 - protein, 237 aa, Artificial Sequence
  Synthetic
SELEEAAKALERIAKKAAKAARDWAEEDRRLAEEAIRAAEEWAKENKKLADELAKAAKDNRDEKDLRRILEEVKKRSEKLAREAKKVLKRIADDSKRLAEEAEEVLKRAADELKKIADELRKRGAGAKEAEDVAKKALDAAREAVEEAKDVNREALKLAEEAVREAERVNREAARLAEEARSDEAVRALEEAAKRSEDAARKAAKLARDAAEKSRRAAEKAIRLLEEAAKEAKDAAR

SEQ ID NO: 13925 - protein, 237 aa, Artificial Sequence; identical to SEQ ID NO: 13924
  Synthetic

SEQ ID NO: 13926 - protein, 239 aa, Artificial Sequence
  Synthetic
KEAEEIAEAVKRLAEASAKTAEELARAVRKAAEDLVKLAKEHADALRTAADRIAKLIEAEEAARKALEAAKKAIEDNERAAKEALEAAKRAIDIIREAAERSKKAAEEAIDIIRRAKEGREDIERALRELLKANRKAVEDAKRALKELADAAREAVKKAKETAERLIEAIKRAADEAPASEDIRREIKRIADELKEITKRLEDEVEKIIRRLEKIAKEAEDRHRKLAEELRRIAEEAKR

SEQ ID NO: 13927 - protein, 239 aa, Artificial Sequence; identical to SEQ ID NO: 13926
  Synthetic

SEQ ID NO: 13928 - protein, 241 aa, Artificial Sequence
  Synthetic
SVDEALEELVRRLLEVLKTVLERTKELSRDDLRVVKEVLRIIEELVKRLLKVIRDGLDDADRVLEEVERVIREAKREVKRWEEVVRKVVEDSRRLIERVLREVEEVIKEAKRLLDERKLGGRREVIEELLRLLREIVRHHKEVSDEHLKLSAELVKRILDVVEETLRLATEIVRRIKEEGNSEDVRRDIERLLEELKRRVERLLEDIERLLRELEKLNEDVLRENKKLLEDLERRVRERKK

SEQ ID NO: 13929 - protein, 241 aa, Artificial Sequence; identical to SEQ ID NO: 13928
  Synthetic

SEQ ID NO: 13930 - protein, 237 aa, Artificial Sequence
  Synthetic
DEERIVREIVKIIEEAVKELVRLVREDIELVKDVVRRHNRLNEEIVKLWKELVDEVLKSRDAEELRRILERIKRLHEENSRRLKEVVERWVKLLKESLEKLEDVARKAREKLKTVLDKPRGEELIKDLARVVEEVLRLLEEVIKTHAEINKRALELLKEVSKHAADIVREALKLAAEVVDDKDLLRRAEEEIRRLLKENEDILKRVEEEVKKSNEELRRILDRVRRELEKALKRLRD

SEQ ID NO: 13931 - protein, 237 aa, Artificial Sequence; identical to SEQ ID NO: 13930
  Synthetic

SEQ ID NO: 13932 - protein, 243 aa, Artificial Sequence
  Synthetic
SKEEEVKRLIDELKRVNERVNKTIKELVKLLEESHEEVLKEIERLIREVLRVIKEVIEAVDKDRKLERLEEKVRKVVEELKRLLDRSRRILRELIKTIDRLLTEHRKEVDKVVRELRELLRAGADAKELLKILEDLLRKSKEVVKRILDIIRKLLEDSRKVVEELVKLIADLLEEILRALKEGRKEALDKLVDAARRVLEAVRDVLRKDERSVERVLDEVRRVAEELERTHREVVKRVEDAAR

SEQ ID NO: 13933 - protein, 243 aa, Artificial Sequence; identical to SEQ ID NO: 13932
  Synthetic

SEQ ID NO: 13934 - protein, 243 aa, Artificial Sequence
  Synthetic
DKEKTVADLIEKVERSHERVLKRLAELIEELKRVNERVNREIERLIRELEEVIDRVIKAVDPDKKLEELEKKVREVSRRLEEILRDHERLVRKVVEELKELLDRSRRLVREVVRKLKKLLEDGSDAKDLLRIIADLLRLSDEVVKELLKLNEKLLKLSEEVVREILKLVKDLLEDLKRALEEGRREMLEELVRVARRVLEAIKTVADELRKRHEEVSREIERVAEEDKRTVEEVLKRIEDAAR

SEQ ID NO: 13935 - protein, 243 aa, Artificial Sequence; identical to SEQ ID NO: 13934
  Synthetic

SEQ ID NO: 13936 - protein, 233 aa, Artificial Sequence
  Synthetic
KDEEIIKRLEDLLKENVDRLREILERVERTHRKVIEELKRILEELEEILRRVIEKLRRKNTLDDKLIKKIEEVLKRLLEVLDELLKRIEKASRESLDSTRRLLDSHEKVLREALRVLREIDGERVLEEVKRVVEDVIREWEEALERNKRVVEKLIKTVEDILKRIDEVVRRLIEAVESRDVERLLKELKRIVEEILRLVRELVTRDIDALRRLLESVRRLVDKLIRIVEERRR

SEQ ID NO: 13937 - protein, 233 aa, Artificial Sequence; identical to SEQ ID NO: 13936
  Synthetic

SEQ ID NO: 13938 - protein, 242 aa, Artificial Sequence
  Synthetic
SDKDRLLEEIKRLIDESRRKAEEILKRSTELLEDSKRDLREILRRSEKILDELLDLIRRNELPEKDLLRELEEVVKENLELAERLSKKLEDIVRENRDLLEKLSRLLVKILKEIVKMVEEAGLDEELTKLIEEVLEDNKRAVKELEEKLKESLKRNKRVVDDLRDKLRKSLEELKDVVTRLRSKEIKDALRRVLEKHKKVLREAIKKHEESLEEHRKVLEEIIELHKRSLKKLEDVIDTVRK

SEQ ID NO: 13939 - protein, 242 aa, Artificial Sequence; identical to SEQ ID NO: 13938
  Synthetic

SEQ ID NO: 13940 - protein, 236 aa, Artificial Sequence
  Synthetic
SKEELIKELKETVKRIIKLLEELSKKMEEIIKRIAELLRELSKKLVDIIKRIIELLRREGAEEEIVKRLDDVAKKNNEAVREIVEELRRIVKENREAVERVAKRLRDVLREVDRVVKELTGEDLKRELDRVLKLLLRILEDAVRELKRSLDEVRKVLKRVVEMHRTSLKELEDILRKVDVREEILKEIKRLLDESKERLDRVLREIEELLRRYEEEVRRVLEEIKKILDELRERIR

SEQ ID NO: 13941 - protein, 236 aa, Artificial Sequence; identical to SEQ ID NO: 13940
  Synthetic

SEQ ID NO: 13942 - protein, 234 aa, Artificial Sequence
  Synthetic
DTERAADEARRRLEKLARDHKEKLKKAAEDLRRLLEEAERAHRKIEKELEELTRKVRDLERAAEELLKLAEEAAKASEEAARRLLEIAERIAKSNEDAARELLKIAEDLARRAEKEEAARRLLEAAKRAAEDSRESAKDLLRAAREAAEKIKKSARELLKAAEDAAKTIRDAKDREDAERALKEAADRAREALRRNLRALREAVREAEEAIEKDARAIDEALKKAREAIEEAER

SEQ ID NO: 13943 - protein, 234 aa, Artificial Sequence; identical to SEQ ID NO: 13942
  Synthetic

SEQ ID NO: 13944 - protein, 238 aa, Artificial Sequence
  Synthetic
SKVEELAERAARSHKELADAIRELAREAAESHKEAAEVVKRLADEAARAAKEVAKAIEDETAAKILEEAAREALRAAEEAIKLLEDSAREVLRLAEEAIRLNEEAAKRVLDAAREAAELEDKEAVDRALKRALKISRDALEEAKKIAKEALELSKRAADEAARIAKEALETAEDALRKAVRDRKVLEDAKKILEDLRKKAEDALRKHKKILDELEEKAKKAAEKHERILRKLDEDAKR

SEQ ID NO: 13945 - protein, 238 aa, Artificial Sequence; identical to SEQ ID NO: 13944
  Synthetic

SEQ ID NO: 13946 - protein, 242 aa, Artificial Sequence
  Synthetic
SEDEEVLKDIKRLLEEVKKTLEEVAKRHEKALREIEERVKEIVKEHEDLLKEVEDKARSNTIDEKDLVEMLRRIHERTVKLIDELVKTLLRLNEETVKALEDLVRKLLKILKDVLERVKDKRVLDLIRELIKKVKDDADKLLELLREVIKRSADIAKEIRDLLDKVIKDSERILDEARRLKNKEDLDRLLKEVLDISRKVLEEVLKIIKRVLEISKRVLEEILRRIEKVLRDIDRVLKKLRE

SEQ ID NO: 13947 - protein, 242 aa, Artificial Sequence; identical to SEQ ID NO: 13946
  Synthetic

SEQ ID NO: 13948 - protein, 238 aa, Artificial Sequence
  Synthetic
SREEDLARKIAEAVKELLDADRRLLREIEKLAEELLRINEELLRRLEELARELLEAVDDERVVDELRRVAERIRRVVERATRELKRVLDEIRRISEKSIRDLEKVLEEIRKIIDDVSRLERKEEVLRVIKEILERLEKVLEEVRDVNRKILERLKEVLEEWERINRELLRIAREVLEKVKVEERLLRKLEEILRRLKDESRKVLKKVKEILDRLKRETEEILDKVRKILERLEEEVRR

SEQ ID NO: 13949 - protein, 238 aa, Artificial Sequence; identical to SEQ ID NO: 13948
  Synthetic

SEQ ID NO: 13950 - protein, 238 aa, Artificial Sequence
  Synthetic
SAEEAAEEALRRAAEAAKESIKAAREALEEVRKAAEKSIRAAEKALRDVKKAAEEAKSAKDEETAKRAAEKALKALKEAIEINAKAAEEALRALREANRINREAAEKALKAAKEALDRANLPDKKLKTAEDLLRKAKKEVEDANRRSEKLIREAEERVRRALKRSKELLKKLEDDARRERAIEEAAKKAIDLARDHARLVKKIAKDLIDLAKEHADLVREIAKRIIEAAKRIAEIVRK

SEQ ID NO: 13951 - protein, 238 aa, Artificial Sequence; identical to SEQ ID NO: 13950
  Synthetic

SEQ ID NO: 13952 - protein, 230 aa, Artificial Sequence
  Synthetic
SDEELLEEIKKILDEVLKKNADAVRSLEKVLDKVLEDNARAVEELKTVLDKVLRDLERRGVGDEEIRELLERLKRELDEALKELAKEYEKLKETLRRVLEELADLYREAKERADRDPDKRKIVEELAKLLDRDVKLNRDLARRVLRLLERDLRVNKELVDRAREVLDEILKRNEDKDVEEVVKEVRDVLRESVDKVRRVIEEVKRVLDRSSEEVERAVEEVKRVLDKVRK

SEQ ID NO: 13953 - protein, 230 aa, Artificial Sequence; identical to SEQ ID NO: 13952
  Synthetic

SEQ ID NO: 13954 - protein, 239 aa, Artificial Sequence
  Synthetic
SDEELLERVERLLRELLDTNRRMLEEVEKELRRLLETNKKTLDDVRRLLKELLDVLETRGVKDEKRLRDIRRRLEEVVRRLDKLHRDIAEDLKRVKERLDRLHERIKRRLEEVVKELRDLKDRGVDERKVLERAAEVLRELLELLRESLEEIERIIRRLLELHKRSTEEAARALEELLRGLEGSDDLRELKKRIEDLLKEDKERLEKIARDIERDLERYARDLKRLEDELREDIERARR

SEQ ID NO: 13955 - protein, 239 aa, Artificial Sequence; identical to SEQ ID NO: 13954
  Synthetic

SEQ ID NO: 13956 - protein, 239 aa, Artificial Sequence; identical to SEQ ID NO: 13954
  Synthetic

SEQ ID NO: 13957 - protein, 239 aa, Artificial Sequence; identical to SEQ ID NO: 13954
  Synthetic

SEQ ID NO: 13958 - protein, 238 aa, Artificial Sequence
  Synthetic
EEDERLTKRVEEIKRENRELLRRLEEEVKELERKSEKIVRDLKEKVDRAKEKLDSGKGSTELLVEELEKLIREILKLSEDHNRTLEEVVRKIEDVLRANLERLKELVDEILKALKERGKGDSEELKRKVEKVARDYERLLRKLREVVKRILDESKRLDEELEERLKEVLKKLEELIKRGGPDKDVLTELKRILDELLKLVEKLIRRNLRLLEELLRLVREILRTSNEILEEILKDARR

SEQ ID NO: 13959 - protein, 238 aa, Artificial Sequence; identical to SEQ ID NO: 13958
  Synthetic

SEQ ID NO: 13960 - protein, 238 aa, Artificial Sequence; identical to SEQ ID NO: 13958
  Synthetic

SEQ ID NO: 13961 - protein, 238 aa, Artificial Sequence; identical to SEQ ID NO: 13958
  Synthetic

SEQ ID NO: 13962 - protein, 245 aa, Artificial Sequence
  Synthetic
TEEEVLRKVEKLIKDLLDVLRDLLRASEEVVREALRVLEELIEENKRVIEELSRALSGGSRESVESALAKNEERLKKILEDADRVLDKWRRLLEELSKKAKAVLDEVRKRLEEIKREVPETEKLRTLLTILEEILRALEKIIRDILRINERLLEKLKRILERLRETNREIDERIRKLVEEARGGSEEKLRRDLTETKKELEKRHEDLRRELEKLLRDYKRELEEIERALEEIEKTLKRRADETRR

SEQ ID NO: 13963 - protein, 245 aa, Artificial Sequence; identical to SEQ ID NO: 13962
  Synthetic

SEQ ID NO: 13964 - protein, 245 aa, Artificial Sequence; identical to SEQ ID NO: 13962
  Synthetic

SEQ ID NO: 13965 - protein, 245 aa, Artificial Sequence; identical to SEQ ID NO: 13962
  Synthetic

SEQ ID NO: 13966 - protein, 234 aa, Artificial Sequence
  Synthetic
SAKETIRKLIEENKDIIRKLAEKLKRLLEESERIAEEALRLIKELLERIERALRRVGSGIDEELLKELEKELARLEEELKEILDRVRDLHRRLAEEIRKILEESKKLNEELEDRLRKDGDVEELLELLERVHATDVRLLRELLKLLKKVHEDVVSLLERLLELLKRVLDRIVEELGLSDKELEKLLEDLEREIRRLAKRLKELSDRLEEKIRKIKRELDDLSARLREKIERTRK

SEQ ID NO: 13967 - protein, 234 aa, Artificial Sequence; identical to SEQ ID NO: 13966
  Synthetic

SEQ ID NO: 13968 - protein, 234 aa, Artificial Sequence; identical to SEQ ID NO: 13966
  Synthetic

SEQ ID NO: 13969 - protein, 234 aa, Artificial Sequence; identical to SEQ ID NO: 13966
  Synthetic

SEQ ID NO: 13970 - protein, 238 aa, Artificial Sequence
  Synthetic
SKEDKARELEKRLRDNLKKLEEVVRELAEVLKRNLEKLRRLAEELLRALKRLLDKLRAGGLPKDELEDLRREVEDVLRRLEDLLRKLKKANDESLTRLEELLRRAEEENRRVLTTLRELLRGNGDDRDLARLVARLVEANNRALEELLRLVAKNVEDNNRVLEELLRLVKELAKRLLGRIRDEDLVRDIRRELKELEERARKILRDDERDLRALEKRIRDIIREDREELERLKERARK

SEQ ID NO: 13971 - protein, 238 aa, Artificial Sequence; identical to SEQ ID NO: 13970
  Synthetic

SEQ ID NO: 13972 - protein, 238 aa, Artificial Sequence; identical to SEQ ID NO: 13970
  Synthetic

SEQ ID NO: 13973 - protein, 238 aa, Artificial Sequence; identical to SEQ ID NO: 13970
  Synthetic

SEQ ID NO: 13974 - protein, 243 aa, Artificial Sequence
  Synthetic
KREDILKKLEDIIRDIIDKLRRILEKVKRLNEDIIREIKRLLDESLKTLEDLLKRIADKSRDRELEDILRRVLEKLRRSLDKLRDTLRKLKEETDTVLERAERTLKELKDRLEKLLRDGEKVSEEDLVEALKALIDELRKVLEDVIRVSKELVERLLRALREHLETNKRLVKELLDALRKTTGDDEEIKRLKEELERRHRRLEEEVERVARELEKAHRDLERDIRRVAEELKKLLKKLRDDRR

SEQ ID NO: 13975 - protein, 243 aa, Artificial Sequence; identical to SEQ ID NO: 13974
  Synthetic

SEQ ID NO: 13976 - protein, 243 aa, Artificial Sequence; identical to SEQ ID NO: 13974
  Synthetic

SEQ ID NO: 13977 - protein, 243 aa, Artificial Sequence; identical to SEQ ID NO: 13974
  Synthetic

SEQ ID NO: 13978 - protein, 236 aa, Artificial Sequence
  Synthetic
SAEETVERLLEEARKRHEEIIKKAKELLDRAREEHERIIREAEKLLEEIKKRVDELVRDGQPAEEVLRDLERVVEEILEVLRRLLDANRRVVDDVLRVLEELLRVNEEVNRRIIETIGLPEEVVEELKEENKRLRDRLDKLVKDLKKTNKEIEDKLRKLAEELKEELERIADRIRKTGTDRKTLLREIEKLLKTLEDILRDLLRLVEKTLKELEEILKDLVDKARENLKRLRERIR

SEQ ID NO: 13979 - protein, 236 aa, Artificial Sequence; identical to SEQ ID NO: 13978
  Synthetic

SEQ ID NO: 13980 - protein, 236 aa, Artificial Sequence; identical to SEQ ID NO: 13978
  Synthetic

SEQ ID NO: 13981 - protein, 236 aa, Artificial Sequence; identical to SEQ ID NO: 13978
  Synthetic

SEQ ID NO: 13982 - protein, 239 aa, Artificial Sequence
  Synthetic
SEKEELKRLLDKLLKELKRLSDELKATIDKILKILKEVSEEVKRTADELLDAIRRGGVDEEVLREIKREIEEIEKKLRKVNKEIEDEIREIKKKLDEVDDKITKEVEKIKEALDKGGVDAKEVIKALKEILKEHADVFEDVLRRLKEIIKRHRDVVKEVLEELRKILEKVAEVLKRQGRSEDELRKVEEDLKRLEDKLKKLLEDYEKKVRELEETLDDLLRKYEETLRRLEKELEEAER

SEQ ID NO: 13983 - protein, 239 aa, Artificial Sequence; identical to SEQ ID NO: 13982
  Synthetic

SEQ ID NO: 13984 - protein, 239 aa, Artificial Sequence; identical to SEQ ID NO: 13982
  Synthetic

SEQ ID NO: 13985 - protein, 239 aa, Artificial Sequence; identical to SEQ ID NO: 13982
  Synthetic

SEQ ID NO: 13986 - protein, 244 aa, Artificial Sequence
  Synthetic
SDAERLVKKIADSLRAYEDLLRKLVERIRDLLRAYEEELRKLLTEIEKTLEDVRDVLRRGNVDERAKEVAKRLVEAVKSLIEIVKRILEKTARVVKKLEDLLRRAAELNRDVVEKILEIIKRGGPEDDFRRIVRRLEELHREVEDAVRKLVEDLKRLHREVVEELADIIRKLDKLLAEVERDIDLGDLLEALRRLVERLKRLIERVLKLNRELVKKLLELLEEALRANRRLVEDILKIADEARK

SEQ ID NO: 13987 - protein, 244 aa, Artificial Sequence; identical to SEQ ID NO: 13986
  Synthetic

SEQ ID NO: 13988 - protein, 244 aa, Artificial Sequence; identical to SEQ ID NO: 13986
  Synthetic

SEQ ID NO: 13989 - protein, 244 aa, Artificial Sequence; identical to SEQ ID NO: 13986
  Synthetic

SEQ ID NO: 13990 - protein, 247 aa, Artificial Sequence
  Synthetic
SATERVLDLARDLIRILLEIHKRALKLIAELVSKLLKIHEDVLKLSEELVEELLEIVKRGLPREDLLRALKELLEKIEDVVRDIERRHRDLLREAEEVVEKLKREHEEVKERIERAVKKLAEDGVDKDKLKELVDVLEEILRLSKTTLEELVKALRDVIRASLEALKENLRILRKIIRELEGLEGVDEDTLRRVLERIREEVERVKEKHRRLLEELKKLLEELRARSADLLEDIKRKVRELEEKTRR

SEQ ID NO: 13991 - protein, 247 aa, Artificial Sequence; identical to SEQ ID NO: 13990
  Synthetic

SEQ ID NO: 13992 - protein, 247 aa, Artificial Sequence; identical to SEQ ID NO: 13990
  Synthetic

SEQ ID NO: 13993 - protein, 247 aa, Artificial Sequence; identical to SEQ ID NO: 13990
  Synthetic

SEQ ID NO: 13994 - protein, 244 aa, Artificial Sequence
  Synthetic
SAEETLRRITEESKRVLEEITKKYEDLERESREVLRKLREDLDRIKRELEDVLTKGGDDKDEVLTVLEKVLDELLKLHRENLRVIKELLRKVLEVDRENLEVLKRLLEKARDLLRRSGRDEKDLKKLEDELRKVKEELEKKHEASKRDIEDLERELDKVTEEVERLLRKLKEELRRAAEGSDEDRERLARLLKALADKLIRVLEEILKINEELNRKIIKFARENLERNRRVNKKVIEVLREAAR

SEQ ID NO: 13995 - protein, 244 aa, Artificial Sequence; identical to SEQ ID NO: 13994
  Synthetic

SEQ ID NO: 13996 - protein, 244 aa, Artificial Sequence; identical to SEQ ID NO: 13994
  Synthetic

SEQ ID NO: 13997 - protein, 244 aa, Artificial Sequence; identical to SEQ ID NO: 13994
  Synthetic

SEQ ID NO: 13998 - protein, 250 aa, Artificial Sequence
  Synthetic
STEEILKRVKEILDELAKELRDIIRESLRTIEELLDELRRILEESERTLEELVKTIKDGVKDSEELLRRLKRLLEDLRRAHEELLKRLKEAVDEHRDRLRKILEELERVLKELRKRIEELRRSGDRISEKDVLRKLEEVLRKALEILERLLKKIRESARELLKIIEEVLDANIKVMEEALKTIKELLKDGPDEVKRRLEEKERRIRTRYEELRRRLRKRVKDYEDKLREIEKKVRRDAERIEEELERAKK

SEQ ID NO: 13999 - protein, 250 aa, Artificial Sequence; identical to SEQ ID NO: 13998
  Synthetic

SEQ ID NO: 14000 - protein, 250 aa, Artificial Sequence; identical to SEQ ID NO: 13998
  Synthetic

SEQ ID NO: 14001 - protein, 250 aa, Artificial Sequence; identical to SEQ ID NO: 13998
  Synthetic

SEQ ID NO: 14002 - protein, 247 aa, Artificial Sequence
  Synthetic
SEKEELLKLIKRVIELLKRVLEEHLRLVEDVIRRLKELLDSNEKIVREVIEDLKRLLDEVRGDKEELDRIKEKLEEVLERYKRRLEEIKRDLERMLEDYKRELKRIEEDLRRVLEEVERIATRGEGPAEALIDKLRKILERALRELDKLSKKLDELLKKVLEELEKSNREIDKLLKDVLRRVEEGGASEDLLRKAKKVITEVREKLKRNLEDVRRVIEDVKRKSARILEEARRLIEEVERELEKIRK

SEQ ID NO: 14003 - protein, 247 aa, Artificial Sequence; identical to SEQ ID NO: 14002
  Synthetic

SEQ ID NO: 14004 - protein, 247 aa, Artificial Sequence; identical to SEQ ID NO: 14002
  Synthetic

SEQ ID NO: 14005 - protein, 247 aa, Artificial Sequence; identical to SEQ ID NO: 14002
  Synthetic

SEQ ID NO: 14006 - protein, 236 aa, Artificial Sequence
  Synthetic
SRAERIKRALEEHIRKLKEITDEVRKTNEELLELTRRILEEAKKANEELVKKIREAGDKSKELEEEIRKLIEESERIVEELEERSKELLKRSREEVEEWRRRSEELLRRLEAILRGVKDEKELVERAVKILRDDSRIAKEILRRNLRLIEENLERLKEIIERNLDLLRRLLELLKRAGVDEEALKELEEKLDRYRRKLEDLLRKYAKKLEDYKRKVKKLEEENEELLKRIEKEMEK

SEQ ID NO: 14007 - protein, 236 aa, Artificial Sequence; identical to SEQ ID NO: 14006
  Synthetic

SEQ ID NO: 14008 - protein, 236 aa, Artificial Sequence; identical to SEQ ID NO: 14006
  Synthetic

SEQ ID NO: 14009 - protein, 236 aa, Artificial Sequence; identical to SEQ ID NO: 14006
  Synthetic

SEQ ID NO: 14010 - protein, 238 aa, Artificial Sequence
  Synthetic
SEAEKIREALETNLRLLEELIKRLKEILDTHNELLRRVIETLERLLKELLELLEEGGLDEEVLREVKRLVDELRKEARRVLDEHEKLVRKIKKEAEDVARESEEIIKEVEDKLKGLDREELLERVRRVLKKSDDLIAELVRRALKILEELTRLLAELLKKVVEILRRIVELVERVLTKKGAPKEDLERLRRKVEELEDRLRRLLEKLARDSAELMRELERILDRYARESEELDRRLAE

SEQ ID NO: 14011 - protein, 238 aa, Artificial Sequence; identical to SEQ ID NO: 14010
  Synthetic

SEQ ID NO: 14012 - protein, 238 aa, Artificial Sequence; identical to SEQ ID NO: 14010
  Synthetic

SEQ ID NO: 14013 - protein, 238 aa, Artificial Sequence; identical to SEQ ID NO: 14010
  Synthetic

SEQ ID NO: 14014 - protein, 248 aa, Artificial Sequence
  Synthetic
SAEEELEKLVRKVEEDLKRLEEESERIKKEIKDTLRAIRKRSEDLKRKVKELLRRLEEEGRRVSLEEAIKIIKEILDELAKVNEDIIRIIKELLKRLVDTNRRVIETIDRILKKLVDDLRRGNLPEDKLREVERELRELKKELEEIVRESEKMLKELEDKLREIVRESRELLEKLRRDLKRIKDGNLSADEALEMLKRLLDKALKVHEDVLRKLVELVDEVLKVHEESLRKLLTLAAKVLEVLRKITK

SEQ ID NO: 14015 - protein, 248 aa, Artificial Sequence; identical to SEQ ID NO: 14014
  Synthetic

SEQ ID NO: 14016 - protein, 248 aa, Artificial Sequence; identical to SEQ ID NO: 14014
  Synthetic

SEQ ID NO: 14017 - protein, 248 aa, Artificial Sequence; identical to SEQ ID NO: 14014
  Synthetic

SEQ ID NO: 14018 - protein, 244 aa, Artificial Sequence
  Synthetic
DDERRKLEDLERMVEELKRKSDKLLKEIREEVERLERETRKLLEELKAKVDELREDLRRNPGDRVLEKLVKLLEDILDKVRKLLKENLDLLKRLLDIIEKLLRDNVRLLEELLRIVRELGKSGDEEKLTRKLEKALKEVRDAARETRERLKEAKKEVKTVADRNRARLEELEEEVKRVLDEIRKEGGPSEDLEKAERLVKDILRLNEEHTAELEDVVRDLLRALEKHTRDLEKLVKDALDKVKT

SEQ ID NO: 14019 - protein, 244 aa, Artificial Sequence; identical to SEQ ID NO: 14018
  Synthetic

SEQ ID NO: 14020 - protein, 244 aa, Artificial Sequence; identical to SEQ ID NO: 14018
  Synthetic

SEQ ID NO: 14021 - protein, 244 aa, Artificial Sequence; identical to SEQ ID NO: 14018
  Synthetic

SEQ ID NO: 14022 - protein, 244 aa, Artificial Sequence
  Synthetic
SKIDEALKKLAKILEDAIKLNKELNDTTAEILKEIIKLNAEVLEKIRRILKELVDLILKGLKDDEEAKKELKKVLEEVARRLEEIKKETDRIVKEVEELNERNDREVKRAAEEVRRLLEEIKRSDRDEKELIKALKEIVDRIREAHRRSVEELSEVVKRILDALKDTLRKLEDVVRKLLELARRIAGDTEELRRVVEKVRKELEDDKERYKRLEEEVRRLLEEMKRRSEDLERKVEEILRRLTE

SEQ ID NO: 14023 - protein, 244 aa, Artificial Sequence; identical to SEQ ID NO: 14022
  Synthetic

SEQ ID NO: 14024 - protein, 244 aa, Artificial Sequence; identical to SEQ ID NO: 14022
  Synthetic

SEQ ID NO: 14025 - protein, 244 aa, Artificial Sequence; identical to SEQ ID NO: 14022
  Synthetic

SEQ ID NO: 14026 - protein, 239 aa, Artificial Sequence
  Synthetic
DEEEKIREDLERTLREYERELRRAKEELKETLKRYEEELREVKEDLDRTLEEVDDLLRRGSLSDREAIRILRELLKKLEEIIRRSKEVLDKLIKDLEDISRRSIEVLEELVKKVRKDGLPEEVLRRIKDLIRRLRERNKEILDRIRKLIEELVERNKRALDRLRKLIKELEERVRRTDDKETLARDLKEALKTLIKLIREILEDNLRVLRRIIELIETLLEDNRRVLEEIIKLIEEATT

SEQ ID NO: 14027 - protein, 239 aa, Artificial Sequence; identical to SEQ ID NO: 14026
  Synthetic

SEQ ID NO: 14028 - protein, 239 aa, Artificial Sequence; identical to SEQ ID NO: 14026
  Synthetic

SEQ ID NO: 14029 - protein, 239 aa, Artificial Sequence; identical to SEQ ID NO: 14026
  Synthetic

SEQ ID NO: 14030 - protein, 244 aa, Artificial Sequence
  Synthetic
DELEKVERLLEEIEKIIEDLIRRVEELVRRILEFNKTTLKRNEELVRELEKLVKETTGGTEELKKIVEKLEKLHREVKKKSDDLVKRAEELLKEVKERLKEIVKTIREELRKVKESGGDREELLKLLAEILDKLLKLLKRIIEELLRILKELIKASKESLDDLKRINEELLRDIEDLIRKGIKESKEVVRKLEEDLRRVRERSKKLVREHEKFLEDLEETIKEEKRRVDEELKRIKEEIKETRR

SEQ ID NO: 14031 - protein, 244 aa, Artificial Sequence; identical to SEQ ID NO: 14030
  Synthetic

SEQ ID NO: 14032 - protein, 244 aa, Artificial Sequence; identical to SEQ ID NO: 14030
  Synthetic

SEQ ID NO: 14033 - protein, 244 aa, Artificial Sequence; identical to SEQ ID NO: 14030
  Synthetic

SEQ ID NO: 14034 - protein, 242 aa, Artificial Sequence
  Synthetic
SEKERLMRLLDKLKDLNRRLVERIKELLDKALELHKKLVKELRELLERLKELVERGGVPEELLTRIDELIKKLEDEARKISKEVKRLIDELKKRLEDIHREVDRLIRELKETLKGVTDKDELLRRVAEVLERIARLSEELIREVKEVLEKIVELSRELLKRVLDVLRRIAELLEDALRKGNVSEETVRRLREALKKLEDDLRKIERDAEREYKKLKDELEELTERYRREIRKLKEELKADRK

SEQ ID NO: 14035 - protein, 242 aa, Artificial Sequence; identical to SEQ ID NO: 14034
  Synthetic

SEQ ID NO: 14036 - protein, 242 aa, Artificial Sequence; identical to SEQ ID NO: 14034
  Synthetic

SEQ ID NO: 14037 - protein, 242 aa, Artificial Sequence; identical to SEQ ID NO: 14034
  Synthetic

SEQ ID NO: 14038 - protein, 247 aa, Artificial Sequence
  Synthetic
SEAEDLEELIKELAELLKDVIRKLEKINRRLVKILEDIIRRLKEISKEAEEELRKGTVEDKDILRDLERRLREILEESDRLLEELKRRLEEILRKSKELLRRLEEVLREILKRAEEVKRSNLPKEELIKEIVKLLEELLRVIEKILEDNIRLLEELVEVIKEILEKHLRLLEELVRVIERILREVGKDKDEAERRRRELKDKLDRLREEHEEVKRRLEEELTRLRETHKKIEKELREALKRVRDRST

SEQ ID NO: 14039 - protein, 247 aa, Artificial Sequence; identical to SEQ ID NO: 14038
  Synthetic

SEQ ID NO: 14040 - protein, 247 aa, Artificial Sequence; identical to SEQ ID NO: 14038
  Synthetic

SEQ ID NO: 14041 - protein, 247 aa, Artificial Sequence; identical to SEQ ID NO: 14038
  Synthetic

SEQ ID NO: 14042 - protein, 240 aa, Artificial Sequence
  Synthetic
SDKEEIKRRVEKTARDLETEHDKIKKRLEDTVRDIKRELDELLEKYERVLRKIEKTLREGDGDATDLVDKLLETVKRLNEEVLRTVKKIADELRRLVEEVLRVLRESNETLARLLEEGNVGDEVRERLEEVLRRTEEIIKTLEEIVKRLLDELRRLVEELRRISKKLKDELDKIKEKGKDEKRLIEEVVRLLRENLDVVRRILEALAKLIKELLEALEEVLRRNKELIRELLRVLDEALK

SEQ ID NO: 14043 - protein, 240 aa, Artificial Sequence; identical to SEQ ID NO: 14042
  Synthetic

SEQ ID NO: 14044 - protein, 240 aa, Artificial Sequence; identical to SEQ ID NO: 14042
  Synthetic

SEQ ID NO: 14045 - protein, 240 aa, Artificial Sequence; identical to SEQ ID NO: 14042
  Synthetic

SEQ ID NO: 14046 - protein, 248 aa, Artificial Sequence
  Synthetic
DEEERVKKLLTDLRRLLRKLHEESKKLLDELRKKLRELRRRSEEKLREVERRLREAEKKLPGTRVLKLVADVVKKVLDAIRDLNRKLEEIIDEALKLLEELDDILRRVVEEALRLLKEIKDTKGDREEVKKRVEDILKRLEELVKEYEDRVREIKKRLRRALEELRDEYRKIREDIERVLDELRKGGVPEELLRVLEELVRTLKKLLDENLKMVERLIRELEKVLDDHERKVRRLIEELLEVLDRDAK

SEQ ID NO: 14047 - protein, 248 aa, Artificial Sequence; identical to SEQ ID NO: 14046
  Synthetic

SEQ ID NO: 14048 - protein, 248 aa, Artificial Sequence; identical to SEQ ID NO: 14046
  Synthetic

SEQ ID NO: 14049 - protein, 248 aa, Artificial Sequence; identical to SEQ ID NO: 14046
  Synthetic

SEQ ID NO: 14050 - protein, 248 aa, Artificial Sequence
  Synthetic
DEDRIIEEIARLLEELLRELLELIKKLIETNRRLNEEHERAVRELARLLEELLDRLVKKGISDEKLKRIRERLKRALDDLERLHREINKRLEDLVRELEKLVREILKELKDALEELRRASARAGGEEVLRRLEEIVKKLLDLVRRILERLKEIHKDNVRLLRELNERLTRIVEDLVRLIREILREAGVDEKIAEEIERELEELRRMIKRLHEDLERKLKESEDELREIEARLEEKIRRLEEKLERKRR

SEQ ID NO: 14051 - protein, 248 aa, Artificial Sequence; identical to SEQ ID NO: 14050
  Synthetic

SEQ ID NO: 14052 - protein, 248 aa, Artificial Sequence; identical to SEQ ID NO: 14050
  Synthetic

SEQ ID NO: 14053 - protein, 248 aa, Artificial Sequence; identical to SEQ ID NO: 14050
  Synthetic

SEQ ID NO: 14054 - protein, 251 aa, Artificial Sequence
  Synthetic
DEEEKIRTTLDLLRKLLKVLREILEELIRSNKELNERLLRLVEDSDRLLEELLKKLADDGGVDEEALRRIKKRLEDLIRTNREIEERIDRESERLAEELRRILRELEKELRRLIEDLKEVLKRGLPREELLRRLKKVVEDVLRILEEVLRVVDELDKENVRLLREWLERNKEIVEEVIRILEDLIRKGGSESEEKVRDTEKKLRDLREKHAEIAKELERLLRENRRRLEELAREAKKVLDELRKRLEDERR

SEQ ID NO: 14055 - protein, 251 aa, Artificial Sequence; identical to SEQ ID NO: 14054
  Synthetic

SEQ ID NO: 14056 - protein, 251 aa, Artificial Sequence; identical to SEQ ID NO: 14054
  Synthetic

SEQ ID NO: 14057 - protein, 251 aa, Artificial Sequence; identical to SEQ ID NO: 14054
  Synthetic

SEQ ID NO: 14058 - protein, 242 aa, Artificial Sequence
  Synthetic
SEKEKLLKESEEEVRRLRRTLEELLRKYREVLERLRKELREIEERVRDVVRRLKEVLDRKGLDIDTIIKEVEDLLKTVLDRLRELLDKIRRLTKEAIEVVREIIERIVRHAERVKDELRKEGGDKEKLDRVDRLIKENTRHLKEILDRIEDLVRRSEKKLRDIIREVRRLIEELRKKAEEIKKGPDERLVKTLIEDVEAVIKRILELITRVAEDNERVLERIIRELTDNLERHLKIVREIVK

SEQ ID NO: 14059 - protein, 242 aa, Artificial Sequence; identical to SEQ ID NO: 14058
  Synthetic

SEQ ID NO: 14060 - protein, 242 aa, Artificial Sequence; identical to SEQ ID NO: 14058
  Synthetic

SEQ ID NO: 14061 - protein, 242 aa, Artificial Sequence; identical to SEQ ID NO: 14058
  Synthetic

SEQ ID NO: 14062 - protein, 244 aa, Artificial Sequence
  Synthetic
SELERAEELIKKLLKLHEDVLRRLTEVDDELLEIHDRVLKRLKEVDDELLKLIRDMLRRGNISEDLVREVEERLKTLEKRSRDKKAENEKALRELKKKSEKLRRESRKLLEELRKKVEELRGVDKKDVEKLIKEIVEVHRAMLEKWLRLNEEIAKVHEDSVRDWLKANEEIARTIEEILRRVLRGDEEAKDIREKLERLLRKSEELVRKSLKELKELLDKSKKLLEDSKRRLEEILKEIKDDSR

SEQ ID NO: 14063 - protein, 244 aa, Artificial Sequence; identical to SEQ ID NO: 14062
  Synthetic

SEQ ID NO: 14064 - protein, 244 aa, Artificial Sequence; identical to SEQ ID NO: 14062
  Synthetic

SEQ ID NO: 14065 - protein, 244 aa, Artificial Sequence; identical to SEQ ID NO: 14062
  Synthetic

SEQ ID NO: 14066 - protein, 244 aa, Artificial Sequence
  Synthetic
SLKEIVKEIIDRASELLKRLLERSEDSLRTASELLRKILEDSRRSLRTIARLLEELLRTSGPEEELERAARRVKEELERLHKEIRDVIEEIKKTLAKLNEDLREAIERVKRELERLLKELEDSGVPEELLELVKRVVELMAELLDRLLALNEKILRDIMSILDEILDLNREILRLVKEIIELIRRDGPDREIEKEIRRILEELKAKHDEIEKKIRELEREIKRAHEELEDRIRKIERDLDRRTK

SEQ ID NO: 14067 - protein, 244 aa, Artificial Sequence; identical to SEQ ID NO: 14066
  Synthetic

SEQ ID NO: 14068 - protein, 244 aa, Artificial Sequence; identical to SEQ ID NO: 14066
  Synthetic

SEQ ID NO: 14069 - protein, 244 aa, Artificial Sequence; identical to SEQ ID NO: 14066
  Synthetic

SEQ ID NO: 14070 - protein, 242 aa, Artificial Sequence
  Synthetic
SSEELLKRIVDEDERVLEEWARVLEEIKDLSKAVVDLLDKVLKEIEAIVDEVTRRLERDGTDDKKKIRDLVEEIKDIIRRAREKLRRIVKENEEILEEAKRRLDKIAEDNRRTLEKVRKELEETKSEREVKRILERVLREAEDSHRRAVELLEELLDRSRRTIEEAIRLIKELLDRILELLKRLGLPKDLLETIKKRVEEIRRTLEKIKRDYDKAIEEIRAKLERKLEEYKEVIDDLRRKTK

SEQ ID NO: 14071 - protein, 242 aa, Artificial Sequence; identical to SEQ ID NO: 14070
  Synthetic

SEQ ID NO: 14072 - protein, 242 aa, Artificial Sequence; identical to SEQ ID NO: 14070
  Synthetic

SEQ ID NO: 14073 - protein, 242 aa, Artificial Sequence; identical to SEQ ID NO: 14070
  Synthetic

SEQ ID NO: 14074 - protein, 238 aa, Artificial Sequence; identical to SEQ ID NO: 13234
  Synthetic

SEQ ID NO: 14075 - protein, 238 aa, Artificial Sequence; identical to SEQ ID NO: 13234
  Synthetic

SEQ ID NO: 14076 - protein, 238 aa, Artificial Sequence; identical to SEQ ID NO: 13234
  Synthetic

SEQ ID NO: 14077 - protein, 238 aa, Artificial Sequence; identical to SEQ ID NO: 13234
  Synthetic

SEQ ID NO: 14078 - protein, 231 aa, Artificial Sequence
  Synthetic
DKAEVLREALKLLKDLLEELIKIHEESLKRILDLIDTLVKVHEDALRALKELLERSGLDERELRKVERMATESLRTIAKLKEELRDLARRSLEKLREDLKRVDDTLRKVEEKVRRTGPSEELIEELIRTIEKLLKEIVRINEEVLKAVRELLKTLLKLSEDVVRRIEEILRKGGVPEEIDRELKRVVEELRRLHEEIKERLDDVARRSEEELRRIIKKLKEVVKEIRKKLK

SEQ ID NO: 14079 - protein, 231 aa, Artificial Sequence; identical to SEQ ID NO: 14078
  Synthetic

SEQ ID NO: 14080 - protein, 231 aa, Artificial Sequence; identical to SEQ ID NO: 14078
  Synthetic

SEQ ID NO: 14081 - protein, 231 aa, Artificial Sequence; identical to SEQ ID NO: 14078
  Synthetic

SEQ ID NO: 14082 - protein, 236 aa, Artificial Sequence
  Synthetic
STREKAKKVLDTLRADNEDMKRVVEKILRALKRTNERAEKLAREITEEIKRILKEVGVSEEALKEIEDTLKRVLEEIKRLLDESKKLLEDVEREIREILKTSEELLERIEREIETVGSDEKTLAEILKRLLELNEEMNRRLLKILRDLLRLNEEVIRRLLAVLERLLDALKEALDRGDVPEDLLRKLEEELRRIKEKLRKALEELEREHRELEKELDKLHDESRKEHERIEEELRR

SEQ ID NO: 14083 - protein, 236 aa, Artificial Sequence; identical to SEQ ID NO: 14082
  Synthetic

SEQ ID NO: 14084 - protein, 236 aa, Artificial Sequence; identical to SEQ ID NO: 14082
  Synthetic

SEQ ID NO: 14085 - protein, 236 aa, Artificial Sequence; identical to SEQ ID NO: 14082
  Synthetic

SEQ ID NO: 14086 - protein, 247 aa, Artificial Sequence
  Synthetic
SKAEKLLKDLREALEKVKRRYEELERRLDEVLKEHEEIVKRLLEELEKVLKRIEEGGLPEEELEKLKKLAEKVKELLRELLRLSKELVDRVRELLKRDLDLVRRLVEIALKVLREAREQPNDEKRVEKIKRDLEKKARRVREENERIKRDLKRTADESRKRLEKLLEDLKRELDRLREDLDRGRKDIDERVEELIERLIRIIERLLREVIKSHEKLVRTIERLIEESIRVNEELLEVIERLLDRARK

SEQ ID NO: 14087 - protein, 247 aa, Artificial Sequence; identical to SEQ ID NO: 14086
  Synthetic

SEQ ID NO: 14088 - protein, 247 aa, Artificial Sequence; identical to SEQ ID NO: 14086
  Synthetic

SEQ ID NO: 14089 - protein, 247 aa, Artificial Sequence; identical to SEQ ID NO: 14086
  Synthetic

SEQ ID NO: 14090 - protein, 243 aa, Artificial Sequence
  Synthetic
DLERVVEDIVDKAKRLLDKNLEVLKRIVDEVLRLLERLLRESRKVVKRVKEIIEELVRDEKELRRVKRALEEVLRRHEEIAKELKERLRKVAKEAEEKHKKLVEDLKRVVDEVRKKLSGPLDREKVLEVLDELVTIIAKLLDENIKVLEEVIRVIAELLERLLDSHRRLIDIIAKLLEGLRPGDEDLLTELEKKLRKLKRDSEKVVDDLKKELERIKREVKRLIEENARTLADIKRAVDEARK

SEQ ID NO: 14091 - protein, 243 aa, Artificial Sequence; identical to SEQ ID NO: 14090
  Synthetic

SEQ ID NO: 14092 - protein, 243 aa, Artificial Sequence; identical to SEQ ID NO: 14090
  Synthetic

SEQ ID NO: 14093 - protein, 243 aa, Artificial Sequence; identical to SEQ ID NO: 14090
  Synthetic

SEQ ID NO: 14094 - protein, 239 aa, Artificial Sequence
  Synthetic
SERELIERWLELHKEILRLIRELVERLLKLHREILDTIKKLIRELLELLEDIARKLGLDKEAKDELREIAKRVEDKLEKLERESRKVEEDLKRKLKELTDESDTVEKRVRDVVRRGTQSREEIAEELLRLDRKLLKAVEELLKEILDLNKKLLDDVRAILEETRRVLEKLLDRVRRGERTDDERRTLTELLKRMEDILEKVERTLKKLLDDSARMAEEVKKTLKELLERSEKVAEDVRK

SEQ ID NO: 14095 - protein, 239 aa, Artificial Sequence; identical to SEQ ID NO: 14094
  Synthetic

SEQ ID NO: 14096 - protein, 239 aa, Artificial Sequence; identical to SEQ ID NO: 14094
  Synthetic

SEQ ID NO: 14097 - protein, 239 aa, Artificial Sequence; identical to SEQ ID NO: 14094
  Synthetic

SEQ ID NO: 14098 - protein, 241 aa, Artificial Sequence
  Synthetic
KKEEDLRREVEEVKEEIRELIERSRESVRRILKEIKDLIRKSKESIDKILEDLKRKNLDETLIRAVEKLLRENLELLKKLLETVKELLERNEELLKRLVEEAERILEELLEVARRSGDEKALERVVREVEKELKRLDDELKKALKDSEEELKRLEDELRRAKEENEKTLKKLRDDLRREGRDEEVLRVVEELLKLLKEHLEENVRILRRILELLRRHHDTNRKIVKRILELLRRVLESIRK

SEQ ID NO: 14099 - protein, 241 aa, Artificial Sequence; identical to SEQ ID NO: 14098
  Synthetic

SEQ ID NO: 14100 - protein, 241 aa, Artificial Sequence; identical to SEQ ID NO: 14098
  Synthetic

SEQ ID NO: 14101 - protein, 241 aa, Artificial Sequence; identical to SEQ ID NO: 14098
  Synthetic

SEQ ID NO: 14102 - protein, 241 aa, Artificial Sequence
  Synthetic
SKKELLEEVVRRAIELLKRHLEKLKRILEEIVRLLEEHLEKVERVLEAILSLLDDLLRRGGDERAIRTLEDVKRRLREILERLADENAKAIKRLADLLDKLEKRNKEAIERLEEILEELKRVRRDEELLRVLETLLKIIEDILRENTKVLEDLLRLVEEILEANLRVVEELLRLAREILTEIVGDEDKLKEIEDELRRLLEELRRLDKAIKDRLRELKKDLDEANRRIKETLKKLLREVEK

SEQ ID NO: 14103 - protein, 241 aa, Artificial Sequence; identical to SEQ ID NO: 14102
  Synthetic

SEQ ID NO: 14104 - protein, 241 aa, Artificial Sequence; identical to SEQ ID NO: 14102
  Synthetic

SEQ ID NO: 14105 - protein, 241 aa, Artificial Sequence; identical to SEQ ID NO: 14102
  Synthetic

SEQ ID NO: 14106 - protein, 238 aa, Artificial Sequence
  Synthetic
SDLEELEALIRRLLKINEDLIRIIEDLIRKSLTLLKRIVDLIRELIREIEEIIRRTGIPKELVDEAREKIKRILDEVERLLRELAKAHREILEELRANLERVRRELKKILDRLRDLKRGSGSEEEIRKLIEELLKVHKESLDSIRRLIEKLLRVHETALRRLAELIRRLLEVLKEVLDKGPVSEEIRKRVRDLEEKVKKLLRDLEEESRRVAEKVEEDLKRVEEESRRTAREVEEKER

SEQ ID NO: 14107 - protein, 238 aa, Artificial Sequence; identical to SEQ ID NO: 14106
  Synthetic

SEQ ID NO: 14108 - protein, 238 aa, Artificial Sequence; identical to SEQ ID NO: 14106
  Synthetic

SEQ ID NO: 14109 - protein, 238 aa, Artificial Sequence; identical to SEQ ID NO: 14106
  Synthetic

SEQ ID NO: 14110 - protein, 234 aa, Artificial Sequence
  Synthetic
SERDVLRELLERIKKLLETLIRIVEELVRRSEETIKRLAELNRRLIEEIRRIVEEVKKGVSEEALRDVERLLKELADETEKILREVKKRLDDNLKRLEEIVRDVERLLKELKEEVDRGDKSKEELVREILKVAEEILRKIEELVKHHLDLNRDILRLFTESAEKLEEILREVLRKLGLDEEVKKRVEELRREYRETLKRLRDESEKIAEELKRLLDELRRRLEELARELRERTK

SEQ ID NO: 14111 - protein, 234 aa, Artificial Sequence; identical to SEQ ID NO: 14110
  Synthetic

SEQ ID NO: 14112 - protein, 234 aa, Artificial Sequence; identical to SEQ ID NO: 14110
  Synthetic

SEQ ID NO: 14113 - protein, 234 aa, Artificial Sequence; identical to SEQ ID NO: 14110
  Synthetic

SEQ ID NO: 14114 - protein, 241 aa, Artificial Sequence
  Synthetic
SKEELVKEIDELNKRVNDLLEELLRKSEKLHKEILELLERLLREIISLLRRILEIVERRLEDETLKRVLEKLEETLRRLKKKVDEELKRLEDENRRLKEEMDRLLRKSAEELERLREKVVRDGGSGDEVLARLLELHTEDLKHAREVLDEVLRLNKKALDLIRAILTEVLKLIKELLKLIEAGADEDELRRLLEDIERKIEALLRELKKESEEIRKRIRELLEDNRDKSRKIKKAIEELKK

SEQ ID NO: 14115 - protein, 241 aa, Artificial Sequence; identical to SEQ ID NO: 14114
  Synthetic

SEQ ID NO: 14116 - protein, 241 aa, Artificial Sequence; identical to SEQ ID NO: 14114
  Synthetic

SEQ ID NO: 14117 - protein, 241 aa, Artificial Sequence; identical to SEQ ID NO: 14114
  Synthetic

SEQ ID NO: 14118 - protein, 246 aa, Artificial Sequence
  Synthetic
KEIEETLKELEDLNREMVETNRRVLEETRRLNKETVDRVKATLDELAKMLKKLVDDVRKGPTSEELKRLLAELEELLARVVRRVEELLKKSTDLLERAVKDSADALRRSHEVLKEVASRVKRAKDEGLPREEVLRLLRELLERHAKVLKDIVRVSEKLLREHLKVLREIVEVLEELLERILKVILDTTGGDKAVEELEKALEEIKRRLKEVIDRYEDELRKLRKEYKEKIDKYERKLEEIERRERT

SEQ ID NO: 14119 - protein, 246 aa, Artificial Sequence; identical to SEQ ID NO: 14118
  Synthetic

SEQ ID NO: 14120 - protein, 246 aa, Artificial Sequence; identical to SEQ ID NO: 14118
  Synthetic

SEQ ID NO: 14121 - protein, 246 aa, Artificial Sequence; identical to SEQ ID NO: 14118
  Synthetic

SEQ ID NO: 14122 - protein, 231 aa, Artificial Sequence
  Synthetic
SKEEEVEKVLRKWEEILRRLIEENKRANDKIRREYEELVKEIRRVLEEIKEVAERLGVSEEVKRILEKLIKLLEDILEYEKENVERLIELNERILRELKKSVEELKALVTRVRRDGLPESEVRKLVEDVLRKNEELLKEAKKAWRDSIENLKRVLEEVAKLVKTVLREIEEKIDDEDVVRALIEVIERLLRVAEEVIRRILKVNTELMRVDERSIRESLKAISEVLKVLDT

SEQ ID NO: 14123 - protein, 231 aa, Artificial Sequence; identical to SEQ ID NO: 14122
  Synthetic

SEQ ID NO: 14124 - protein, 231 aa, Artificial Sequence; identical to SEQ ID NO: 14122
  Synthetic

SEQ ID NO: 14125 - protein, 231 aa, Artificial Sequence; identical to SEQ ID NO: 14122
  Synthetic

SEQ ID NO: 14126 - protein, 245 aa, Artificial Sequence
  Synthetic
DEDELIRKLLEDLKDIVRKILELIERDLRDIERVVRRIVKVIRDDLKKIKEVVDDIARGVPRTEELERVIKRIEELLRTSEEELDRILKEIEELLRESRRRLEEVVSAVEELLRRVEEIVDKGRESKEDVIKLLREVVDDILRLVEEVVRTNLEIIKRILELIERVIRLNLSIIRDILRLLEGTVDSELADRIRKLIEDLERHTAKVLEDVKRAITELRKNSKDILEEVRKLIDELRKRIKEVED

SEQ ID NO: 14127 - protein, 245 aa, Artificial Sequence; identical to SEQ ID NO: 14126
  Synthetic

SEQ ID NO: 14128 - protein, 245 aa, Artificial Sequence; identical to SEQ ID NO: 14126
  Synthetic

SEQ ID NO: 14129 - protein, 245 aa, Artificial Sequence; identical to SEQ ID NO: 14126
  Synthetic

SEQ ID NO: 14130 - protein, 247 aa, Artificial Sequence
  Synthetic
RDRDVLRKVKAEIEELVARIEKVSRDALSEVKRLLDENRKIAEDVLRLIESLLRKIRDTRGDDEVVKETEEVLRDNHRLLEELIRRLIKVLEEWLRRHKKLLDEIRELLKEILRLVKESGVSEDLLRRLKRVIEELDKKLKESEEKLRRVVEKAKEDLKAVLEEHRKVLEDLKRALEEVREKLRERGSEEVVEELLRMLKRVAEEMKRVHDDLSRAVEKVVRDVVRVDKELLDELARILRRLEEVIT

SEQ ID NO: 14131 - protein, 247 aa, Artificial Sequence; identical to SEQ ID NO: 14130
  Synthetic

SEQ ID NO: 14132 - protein, 247 aa, Artificial Sequence; identical to SEQ ID NO: 14130
  Synthetic

SEQ ID NO: 14133 - protein, 247 aa, Artificial Sequence; identical to SEQ ID NO: 14130
  Synthetic

SEQ ID NO: 14134 - protein, 231 aa, Artificial Sequence
  Synthetic
SKDEELARLLEELVERWRKIVEDLERDHRRLVKEIRELVERIRKKLEELVDRIRKNGIDERIVRLIEEIAKIIEEVLKEIVKLVERAVRENVRVLRESVRLVAELVETLARLLRGSDERVTEAIKKVLDTSEDLIRRVIKVNEDILREIAKLVEEVLREAERILTEIKKEGDREEIRRILEELKRIVDDVLRIIARILKLLRDLTRRLAEVAKAVHKLLEELLRKLKEDTR

SEQ ID NO: 14135 - protein, 231 aa, Artificial Sequence; identical to SEQ ID NO: 14134
  Synthetic

SEQ ID NO: 14136 - protein, 231 aa, Artificial Sequence; identical to SEQ ID NO: 14134
  Synthetic

SEQ ID NO: 14137 - protein, 231 aa, Artificial Sequence; identical to SEQ ID NO: 14134
  Synthetic

SEQ ID NO: 14138 - protein, 235 aa, Artificial Sequence
  Synthetic
SAAETVKRLAEESSERIRKIVEDDKRVADDSSRKIKELIEEIKRRVKELLDRIKGLGSTEDLEKLLDELLKEVKRLLEELLDAHAKWSDDSRRLLEAVLRTHKELIDRLIKLLRDGGKPEEAVRRLEKVLRESLRRVKEVIKELIDLNKETLDRLKKIVEDLERVLREVLTELRRGSDSKEAVIRLIEELVKLLEDVLRRLLEVNETLVELNKRVWDRLVRINEELAEVALRVAT

SEQ ID NO: 14139 - protein, 235 aa, Artificial Sequence; identical to SEQ ID NO: 14138
  Synthetic

SEQ ID NO: 14140 - protein, 235 aa, Artificial Sequence; identical to SEQ ID NO: 14138
  Synthetic

SEQ ID NO: 14141 - protein, 235 aa, Artificial Sequence; identical to SEQ ID NO: 14138
  Synthetic

SEQ ID NO: 14142 - protein, 235 aa, Artificial Sequence
  Synthetic
SALETVKKLLEDSSEKIERIVEEDERVAKESSDRIRRLVEEDKRVADEILDLIEKIGDTDTLLKLVEEWSRTSKKLLDDVLKLHKDWSDDSRRLLEEILRVHEELIRRVKEILDREGKPEEVVRELEKVLKESLDTLEEIIRRLDEANAATVKRVADVIRELEDINRKVLEEIKRGSDDAEAVIKVIEKLIRANKRVWDALLKINEDLVRVNKTVWKELLRVNEKLARDLERVVK

SEQ ID NO: 14143 - protein, 235 aa, Artificial Sequence; identical to SEQ ID NO: 14142
  Synthetic

SEQ ID NO: 14144 - protein, 235 aa, Artificial Sequence; identical to SEQ ID NO: 14142
  Synthetic

SEQ ID NO: 14145 - protein, 235 aa, Artificial Sequence; identical to SEQ ID NO: 14142
  Synthetic

SEQ ID NO: 14146 - protein, 242 aa, Artificial Sequence
  Synthetic
DEIETVLKRLAELIKESLDLLRETLDELRKIIEESKKSLEDVLRRLKELIDRLRRLAKEGGSEELLRLLIEVIERLLKVVEDLLRESNRVVERLIRVNREALRLSNRVVADLLKVLKDAGPDSEELRKLAEDVLRENAELSRESVKIAEKMLEENRDLTRRLKELAKKVLEEIRDLVRGVRDADELLRRVEEILKRLLELIRRIIEEHRKILERLLETHEDLIRKHEEILRRLLKAADEERQ

SEQ ID NO: 14147 - protein, 242 aa, Artificial Sequence; identical to SEQ ID NO: 14146
  Synthetic

SEQ ID NO: 14148 - protein, 242 aa, Artificial Sequence; identical to SEQ ID NO: 14146
  Synthetic

SEQ ID NO: 14149 - protein, 242 aa, Artificial Sequence; identical to SEQ ID NO: 14146
  Synthetic

SEQ ID NO: 14150 - protein, 233 aa, Artificial Sequence
  Synthetic
SKEEKLKDDVRAVLEDLDRVLKELEKLSEDNLRELKRVLDRITDLHRRILDELRKGIGSEELLRRVEKVLKDNLDLLRKLVEEHKESSERDLKRVEDLVREIKEVLRKLLELEDRGTDIRKIEEEIERLLRKIRKAVEESKDLNRRNSERIEEVARRSEELARRLLKEIRERGDSKAAEDILRVLEKLVKVSREAIKLILELSEHHVRVSTRIARLLLDVARKLAEVIKEAER

SEQ ID NO: 14151 - protein, 233 aa, Artificial Sequence; identical to SEQ ID NO: 14150
  Synthetic

SEQ ID NO: 14152 - protein, 233 aa, Artificial Sequence; identical to SEQ ID NO: 14150
  Synthetic

SEQ ID NO: 14153 - protein, 233 aa, Artificial Sequence; identical to SEQ ID NO: 14150
  Synthetic

SEQ ID NO: 14154 - protein, 238 aa, Artificial Sequence
  Synthetic
SEIEDVIRRLRKILEDLERVSEKLLREIKKILDEARRLNEEVIKEIKRVLEDAVRVFRDGSGSKEELAKLVEELIRELAKLAKEVDEIHKRIVERLKALVEDAERIHRKIVETLEEIVRGVPSEELKRVVEAIVEVIKEHLKVLADVIRRIIKAIEENAETIKRVLEDIVRVLELVLRGEGSIEDLVREVERLIKRIEDSLRELEKTVRELLKRIKEASDKVREDVDRLIKELKEAAD

SEQ ID NO: 14155 - protein, 238 aa, Artificial Sequence; identical to SEQ ID NO: 14154
  Synthetic

SEQ ID NO: 14156 - protein, 238 aa, Artificial Sequence; identical to SEQ ID NO: 14154
  Synthetic

SEQ ID NO: 14157 - protein, 238 aa, Artificial Sequence; identical to SEQ ID NO: 14154
  Synthetic

SEQ ID NO: 14158 - protein, 246 aa, Artificial Sequence
  Synthetic
SREEIVATLEDLARKILEVVKKLAKEIEDAWREIERAVREILKRLEELWREIEDVVRKKVDSRVAEILETVVKRVVDITRRLIEEAERVVRELVDITRKLITILEEVVRRLVEIVREASKIDDRRELEDMLRKIREVVREVIERLKKLDEDVRRVVEEVIRRLEELNKRLEDVIREVKKRLKELGLSEEAVKELVELLEEILERNTRVIKEIIDLLRTVIRIHEKIVEDLIKLLEELLRRLEEATR

SEQ ID NO: 14159 - protein, 246 aa, Artificial Sequence; identical to SEQ ID NO: 14158
  Synthetic

SEQ ID NO: 14160 - protein, 246 aa, Artificial Sequence; identical to SEQ ID NO: 14158
  Synthetic

SEQ ID NO: 14161 - protein, 246 aa, Artificial Sequence; identical to SEQ ID NO: 14158
  Synthetic

SEQ ID NO: 14162 - protein, 237 aa, Artificial Sequence
  Synthetic
KEKEDALKKLEDLARKSREDLERVLRKHKKILDKIEELLKRVLDEHKKIVDDILRKTGTESEILKELARLLREHHEALRRLIEELRRLLEEHHKILEDLAREHKRLLDELIKVVADGVDKDELERIIKELRERDKKLVDDLRKVSEDLLDAVRKLVEDLERISRELLRRVEELAKGIDEELAREVERVIKELLDKSKEILERIERAIDELLKVSEEILKLSEDASEELLKILREFAK

SEQ ID NO: 14163 - protein, 237 aa, Artificial Sequence; identical to SEQ ID NO: 14162
  Synthetic

SEQ ID NO: 14164 - protein, 237 aa, Artificial Sequence; identical to SEQ ID NO: 14162
  Synthetic

SEQ ID NO: 14165 - protein, 237 aa, Artificial Sequence; identical to SEQ ID NO: 14162
  Synthetic

SEQ ID NO: 14166 - protein, 229 aa, Artificial Sequence
  Synthetic
SKEERLREVAEKHKKDLEDIVKRVDEAAKETARRLEEILKRLEEVLKKILDDLEKGPDDEKLKKVKKILKDIMDRLAELIKKILKLLKENLEKIKELLRRNLEISEELLKLAKGLSDRDVLETVRRVLEKLDEEWDRVLEDSRRIIETILRELDTLLREVEKLIKEIKDEISGSKEVLDILERAVEVVRRVIKALKEVLERHVDATREVIERVKRVNKRLLEAVREVVT

SEQ ID NO: 14167 - protein, 229 aa, Artificial Sequence; identical to SEQ ID NO: 14166
  Synthetic

SEQ ID NO: 14168 - protein, 229 aa, Artificial Sequence; identical to SEQ ID NO: 14166
  Synthetic

SEQ ID NO: 14169 - protein, 229 aa, Artificial Sequence; identical to SEQ ID NO: 14166
  Synthetic

SEQ ID NO: 14170 - protein, 241 aa, Artificial Sequence
  Synthetic
SEKELLKEILDRIRELLEDDNRLLKRIVDEIRKLLEEWLRVHKEILERIKELLDRIGAPEDVIRELTRALKETEEDVDRVIRTLEKLLKEVLDAHEEVVRKLDRLLKEVERLVEGGDAEEVVRDLLRVVKEILDESKAVIDELARVVDEILKLLEEVDRKLAKVVKEILEDVLRGSGDDEDAVRKIAKIIEELKRLLEDLARDTRRVIEEAKRLLKEWRDRNKEVADTLKKLLEDLIRKIR

SEQ ID NO: 14171 - protein, 241 aa, Artificial Sequence; identical to SEQ ID NO: 14170
  Synthetic

SEQ ID NO: 14172 - protein, 241 aa, Artificial Sequence; identical to SEQ ID NO: 14170
  Synthetic

SEQ ID NO: 14173 - protein, 241 aa, Artificial Sequence; identical to SEQ ID NO: 14170
  Synthetic

SEQ ID NO: 14174 - protein, 248 aa, Artificial Sequence
  Synthetic
SEDELLEKIVRKLAEAVKRIEEELRKSKREIERLVKEIKEKLEDSLARVKETLDRIRETRKGPSDEEVLERLVRTLEELLARHLKLIEDIARELKKLLKEHLDRIETIVRDLKRLLKEILDELERTGLPREALEAVRELVKTVARLLDEVLKNNKKLLDDLKKELDDVLANNKRIVDELARLLERVRRGKEDLEELLRLLKEVIERSIESLERLLELILRVLEYSVASLEELLRRLLEVIKRIVDTTK

SEQ ID NO: 14175 - protein, 248 aa, Artificial Sequence; identical to SEQ ID NO: 14174
  Synthetic

SEQ ID NO: 14176 - protein, 248 aa, Artificial Sequence; identical to SEQ ID NO: 14174
  Synthetic

SEQ ID NO: 14177 - protein, 248 aa, Artificial Sequence; identical to SEQ ID NO: 14174
  Synthetic

SEQ ID NO: 14178 - protein, 237 aa, Artificial Sequence
  Synthetic
DEDEIAEELKRLLREVEEASKEIVRRMRELAREANKASEDILRTLEKLLEELRRRVEESGGSSKAVLDKIREVLETLKELLDRHHETVRDLVRRLKELLDRHNETVAKLVEDIKALLDKSGGREEIKKRLEDALREHNRIIAEIKKLLDKVLKDHKDILDDIKKKLDDVLREVTEILKRGRIDEVVRRIERVIREVIKILARANKRLHDVVEEIIRLLEEVTDELRRVVEEVIRRTK

SEQ ID NO: 14179 - protein, 237 aa, Artificial Sequence; identical to SEQ ID NO: 14178
  Synthetic

SEQ ID NO: 14180 - protein, 237 aa, Artificial Sequence; identical to SEQ ID NO: 14178
  Synthetic

SEQ ID NO: 14181 - protein, 237 aa, Artificial Sequence; identical to SEQ ID NO: 14178
  Synthetic

SEQ ID NO: 14182 - protein, 246 aa, Artificial Sequence
  Synthetic
DAEEKAKKIEDVARRYAEEVKRVLDDLERLLRESEEEVERIVRKLEKLARDLEERVREGTKSEAVERLVRELLKAIKELIDVLRDVVRLSAEVIKELLDVLRELVELNLRAIKEIIEVLSKGKSEEVKKALDEILEKIEKVNTDVNRRLAEIIRKLREIHEEVLRELDKILRDIESVVRDVERGIDDKEVIDALKELLKVLEDLLREIKEALTRNLEKIDELLKLLHELSRRVIEELRKLLEDLKR

SEQ ID NO: 14183 - protein, 246 aa, Artificial Sequence; identical to SEQ ID NO: 14182
  Synthetic

SEQ ID NO: 14184 - protein, 246 aa, Artificial Sequence; identical to SEQ ID NO: 14182
  Synthetic

SEQ ID NO: 14185 - protein, 246 aa, Artificial Sequence; identical to SEQ ID NO: 14182
  Synthetic

SEQ ID NO: 14186 - protein, 240 aa, Artificial Sequence
  Synthetic
DEEELLREIKTILDESLKALEELIRKIMRILDKSLKDLEEIVREIKKTIDELLEKVRRSGLPEEVLKKVASVAEKVKEDIDRLLEDVERSHREVKKKLDELLKEVKRSHEEVKKELDSLRGDSDRDTVAREILRVLKKNLDVLAEVVEKIVKVLEDNLKSLKAVLETLVDLLRKLIKVLREGGLSEEALDDLRRLVKELADKLRKLLKDYKDLLKELKDEAKKLLDDYARLIEELEKKAR

SEQ ID NO: 14187 - protein, 240 aa, Artificial Sequence; identical to SEQ ID NO: 14186
  Synthetic

SEQ ID NO: 14188 - protein, 240 aa, Artificial Sequence; identical to SEQ ID NO: 14186
  Synthetic

SEQ ID NO: 14189 - protein, 240 aa, Artificial Sequence; identical to SEQ ID NO: 14186
  Synthetic

SEQ ID NO: 14190 - protein, 237 aa, Artificial Sequence
  Synthetic
SREELLDRILEAIAKILEDLKRLIDENLARLEEVVRELERIIDRNLKLIREILDELKKGSGSEEILEKIKKVDKELEDLIRRLLKKLEDLIRETERRLREILKRIRDLLKEVKDRDKDLERLLEVLEEVLRVIAELAKELLDSLRKVLKVVEEVLRLLNEVNKEVLDVIRELAKDGGSDEIIRKLDELLKEVEKVHKEVKDRIRKLLEDHKRSLDEVKKKLERLLERAKEVVEREKK

SEQ ID NO: 14191 - protein, 237 aa, Artificial Sequence; identical to SEQ ID NO: 14190
  Synthetic

SEQ ID NO: 14192 - protein, 237 aa, Artificial Sequence; identical to SEQ ID NO: 14190
  Synthetic

SEQ ID NO: 14193 - protein, 237 aa, Artificial Sequence; identical to SEQ ID NO: 14190
  Synthetic

SEQ ID NO: 14194 - protein, 246 aa, Artificial Sequence
  Synthetic
SEREELLERIKEILKRVKDKLDEDLKRLKEILEKLKEKADRDLEELRRRIEEVREKLERTGRTDELVKEVLDTVRRNLENLKRLVEDILRKLEENVKNLTDLVREILKLITELIKRLEDGGLPKEVLDALRRVLEKLEELLREILERLKRSLEAVKRKIEELLKELERSLDELRRALERIRKEIGDSETAVRAIIRVLEKHLEAVRRVLEELLKVLAEHLETVRELIERLKRVLEEAIEVVERVAR

SEQ ID NO: 14195 - protein, 246 aa, Artificial Sequence; identical to SEQ ID NO: 14194
  Synthetic

SEQ ID NO: 14196 - protein, 246 aa, Artificial Sequence; identical to SEQ ID NO: 14194
  Synthetic

SEQ ID NO: 14197 - protein, 246 aa, Artificial Sequence; identical to SEQ ID NO: 14194
  Synthetic

SEQ ID NO: 14198 - protein, 240 aa, Artificial Sequence
  Synthetic
DREKSVRDIEEDLKRVLDKLRRRVETSKEELKKVLKADKENADELEKTLRDVVRELDRGIDSEVLRAVREIVKRLVEVVRRYNELSEKIIRDLVRVNDRVLELLKRIVKRLIDVVRELEKIGDKEKALRRLEEVVKEVKRRIEELLKELEDVHRELVKILEEVNEDLKRVATEVKEIIKTGIKSSEVAKELDEVIKRLLDNLKENTDRLKEVIDRNLADLRDLAEELRAVIERLLEDARR

SEQ ID NO: 14199 - protein, 240 aa, Artificial Sequence; identical to SEQ ID NO: 14198
  Synthetic

SEQ ID NO: 14200 - protein, 240 aa, Artificial Sequence; identical to SEQ ID NO: 14198
  Synthetic

SEQ ID NO: 14201 - protein, 240 aa, Artificial Sequence; identical to SEQ ID NO: 14198
  Synthetic

SEQ ID NO: 14202 - protein, 252 aa, Artificial Sequence
  Synthetic
SLEEITKRLLELVEENLARHEEILRELLELAKRLAKEDRDILEEVLKLIEELLKLLEDNGSSEEDLKRLLKEVIEELRAVVKRVKDKWDEVVKRIEDLVKKLKELHDDTLRKLRELVRKIVTDISESGGEAEKVKRVVEKILELVERLAKVVKESVEKLLEILRELAEVSKRVAEALLRLLEELVRVIRIKDERTLREVVRKVLEEAKRLLDELEEVHKRVKKELEDIIEENRRVVKRVRDELREIKRELDE

SEQ ID NO: 14203 - protein, 252 aa, Artificial Sequence; identical to SEQ ID NO: 14202
  Synthetic

SEQ ID NO: 14204 - protein, 252 aa, Artificial Sequence; identical to SEQ ID NO: 14202
  Synthetic

SEQ ID NO: 14205 - protein, 252 aa, Artificial Sequence; identical to SEQ ID NO: 14202
  Synthetic

SEQ ID NO: 14206 - protein, 241 aa, Artificial Sequence
  Synthetic
SAEEAVEKLVRIARAIVKINEDLSREVVRILREIVRLNEETTRLLVEIAREVVKVVEDGGLSEDVVRKLRKLVKELEDLLKKSNDDIRKLVEDVARRLKESNDEIRRLVERLEELLKRGPGDEELLRLVEELTEELLRTHEEVVKALEKLTADLLELHRELLERVRRLTKRIEEELKRVGVSEELLRRLEELRKRLEKVLDDSAKELEKLKRELERLLEESRRKLEKLKRDLERVLEETRR

SEQ ID NO: 14207 - protein, 241 aa, Artificial Sequence; identical to SEQ ID NO: 14206
  Synthetic

SEQ ID NO: 14208 - protein, 241 aa, Artificial Sequence; identical to SEQ ID NO: 14206
  Synthetic

SEQ ID NO: 14209 - protein, 241 aa, Artificial Sequence; identical to SEQ ID NO: 14206
  Synthetic

SEQ ID NO: 14210 - protein, 237 aa, Artificial Sequence
  Synthetic
REDEVLRDIERLLREIEEKIRRILEESTAELRKVEEEVKRIIERTKRELKAIKEDVERKGIDEELRKLLDEVLDKLTKLIERNKRSLERILELIKRIIDENLEVLRDIIRLLEELLKATKDNGVPKDEVIKLVEDVVRRIEELVTRVVARNEKLVKDLDDLAKKNVRENEELLREIDRGLDEDLLEKIKRVIREHIKALEKLARDLKEILRRHIEALKELARDLAEVIRKLLEDVKR

SEQ ID NO: 14211 - protein, 237 aa, Artificial Sequence; identical to SEQ ID NO: 14210
  Synthetic

SEQ ID NO: 14212 - protein, 237 aa, Artificial Sequence; identical to SEQ ID NO: 14210
  Synthetic

SEQ ID NO: 14213 - protein, 237 aa, Artificial Sequence; identical to SEQ ID NO: 14210
  Synthetic

SEQ ID NO: 14214 - protein, 237 aa, Artificial Sequence
  Synthetic
SREDLLRSLAELIETILRKSSELLDRLLKLVREHSETSERLIRELKKILEDILKLIKGGISEDDVRRIVKEAKDELRRSVEEVKKSVDDLKEELKRSLREVRELVKSIADALEEIVRRSSGLGEVIKKLLELLRRLLEVHERTIRLLAELLERHLEVHEESIRLLLRLLEELLELVERKGDEKELRRIAEAVERVLRDHKAKNDKILRDVEEVLRRHLEELARILKDVKKVLDEARK

SEQ ID NO: 14215 - protein, 237 aa, Artificial Sequence; identical to SEQ ID NO: 14214
  Synthetic

SEQ ID NO: 14216 - protein, 237 aa, Artificial Sequence; identical to SEQ ID NO: 14214
  Synthetic

SEQ ID NO: 14217 - protein, 237 aa, Artificial Sequence; identical to SEQ ID NO: 14214
  Synthetic

SEQ ID NO: 14218 - protein, 239 aa, Artificial Sequence
  Synthetic
SEEDEVLKTLDRKHKEAKKELDKVLRELEEEHKKVKRELDEVLKRLEDIHRRITELLRRGGISLEDVLRMVKEANRELVEVIKRIVKTVEDLNARAVEVVKRLAEELERLNAEMVKVLRKSGRSEEIEKDLRRSSADIRRLVEEIERRLRDSLRKLRKLADDLAKKLKESLDKLEELVRRGVDEEAVERVLKENKELIEEIVRLIRKILDENIELIRRIVRLLERLLRENLRLIEEARK

SEQ ID NO: 14219 - protein, 239 aa, Artificial Sequence; identical to SEQ ID NO: 14218
  Synthetic

SEQ ID NO: 14220 - protein, 239 aa, Artificial Sequence; identical to SEQ ID NO: 14218
  Synthetic

SEQ ID NO: 14221 - protein, 239 aa, Artificial Sequence; identical to SEQ ID NO: 14218
  Synthetic

SEQ ID NO: 14222 - protein, 248 aa, Artificial Sequence
  Synthetic
SKEEDVRRLIEELVRELRRILEENRRMLKELVEKLEEVLRRSEEVWRRLAKELDELLKEGNSDAVREAVETIRRVLEDLVELDRRVVKVIKEVLERHAKSSTELVRELEDVLRAAVEAIEKGKSEEDLKRELRKLKERLKSVLKRHDDTNKELFRELEDVLRKHEEELRRLADELRRLLEDLKRSGDIPEEVIKKIEDLVRKTERELREVHKELRRLVEEAKEVVDRSVEILRDLVRKIVRILEESAR

SEQ ID NO: 14223 - protein, 248 aa, Artificial Sequence; identical to SEQ ID NO: 14222
  Synthetic

SEQ ID NO: 14224 - protein, 248 aa, Artificial Sequence; identical to SEQ ID NO: 14222
  Synthetic

SEQ ID NO: 14225 - protein, 248 aa, Artificial Sequence; identical to SEQ ID NO: 14222
  Synthetic

SEQ ID NO: 14226 - protein, 233 aa, Artificial Sequence
  Synthetic
SEKEAIKEVAELLKALIDDLLRLLKEDVDTARRVLDEIKKLLEENESIAREVLRRLREGKGAERAEELVREWIERTREILKRIEELLRRWTRKTREILKRIEELVRRVIEVVRRGGVPKELVDKLEEVLRKLLKLVEDHVRKVEKIISELLKLIKEHVEKVERIARKLLELLRRGGDETDLDRIVKEMEKVLEDSIRELEKLVKRLEDILRESEKALRDLLSELAKVLEEVRT

SEQ ID NO: 14227 - protein, 233 aa, Artificial Sequence; identical to SEQ ID NO: 14226
  Synthetic

SEQ ID NO: 14228 - protein, 233 aa, Artificial Sequence; identical to SEQ ID NO: 14226
  Synthetic

SEQ ID NO: 14229 - protein, 233 aa, Artificial Sequence; identical to SEQ ID NO: 14226
  Synthetic

SEQ ID NO: 14230 - protein, 237 aa, Artificial Sequence
  Synthetic
SREELLKELRKLVEEIKRRSEELLRRLEKLLEDNERRTRELLERLKELLREIEERIRGGGPSEEVIRLLEELVRAIERVLEEHLESNRRLVEAAESVLREHVELVKSLVRAIEDVVEKGLSEDKIRTIKKLLDEWARRLEKLVRDVRRKLEEWIKRTEEMIDEVARLLEELKETIRRKGGDEDTVRELTELVRRLLKRVEELLKRSLEILRELIKAIADAIKESLDILDRLLREVAR

SEQ ID NO: 14231 - protein, 237 aa, Artificial Sequence; identical to SEQ ID NO: 14230
  Synthetic

SEQ ID NO: 14232 - protein, 237 aa, Artificial Sequence; identical to SEQ ID NO: 14230
  Synthetic

SEQ ID NO: 14233 - protein, 237 aa, Artificial Sequence; identical to SEQ ID NO: 14230
  Synthetic

SEQ ID NO: 14234 - protein, 243 aa, Artificial Sequence
  Synthetic
SEAERLADEVRKAVKKSEEDNETLVREVEKAVRELKKNNKTWVDEVRKLMKRLVDLLRDGQVSDRDLLKELEEVLRRVLEALAENHERTEEILKRWLDRYAEDIERLRKVLKEVIEALKRGGSDDKRIVDELEEILRRNEDVLDKIAKRLRRLLEEDRRLLERIVRELKRLLDDLDRITKEGKSEELVRIAIEVLKRLLEIIEELVRLNNEILERLLKIVRELHKDNIKILEDLLRIIEEVLR

SEQ ID NO: 14235 - protein, 243 aa, Artificial Sequence; identical to SEQ ID NO: 14234
  Synthetic

SEQ ID NO: 14236 - protein, 243 aa, Artificial Sequence; identical to SEQ ID NO: 14234
  Synthetic

SEQ ID NO: 14237 - protein, 243 aa, Artificial Sequence; identical to SEQ ID NO: 14234
  Synthetic

SEQ ID NO: 14238 - protein, 245 aa, Artificial Sequence
  Synthetic
SEKDEVTRRIRELLKEAEETNREAIERIKRLLDRVREAVEEVAKRSEELLRRLKKVLDRGLQDDEALLKLLIDALREHNRLSTELIKILIDVLRTILKIIKDVLATNIEIARRILDLVRRLAERGGLDDRLVKEVEKLVRTAERLHRDALRKVKRLVEELEKRLRELVKTDHDLVRRLETLLRRGSGSKEDLLREIARILAESLRLIRELLKEIEKIVKEIIELLERLNDELRKIIEAILETTKK

SEQ ID NO: 14239 - protein, 245 aa, Artificial Sequence; identical to SEQ ID NO: 14238
  Synthetic

SEQ ID NO: 14240 - protein, 245 aa, Artificial Sequence; identical to SEQ ID NO: 14238
  Synthetic

SEQ ID NO: 14241 - protein, 245 aa, Artificial Sequence; identical to SEQ ID NO: 14238
  Synthetic

SEQ ID NO: 14242 - protein, 239 aa, Artificial Sequence
  Synthetic
SAEDLVRRVKDLVDKLEDKLRKVVRTNERLWEEIRKRLEELVRRNKELWDALVEKLKAGDKDKDELIEEAKSLEDESNALVEKLVRDIERVLAESNKLLDTLAKEIEEVLEEIVELVERGSGSDKEAREKLEDIKARLKEVLKKLREESKRIIDELRRLLEEYKRLVKEIRDRIEEVRKRNSEIRVLVELVRRHNKVLKELVEELEKLVRDHNRVVEEVVRELVELLSRAVEVIKEVVK

SEQ ID NO: 14243 - protein, 239 aa, Artificial Sequence; identical to SEQ ID NO: 14242
  Synthetic

SEQ ID NO: 14244 - protein, 239 aa, Artificial Sequence; identical to SEQ ID NO: 14242
  Synthetic

SEQ ID NO: 14245 - protein, 239 aa, Artificial Sequence; identical to SEQ ID NO: 14242
  Synthetic

SEQ ID NO: 14246 - protein, 232 aa, Artificial Sequence
  Synthetic
SEKELVDDIRRILEEILRLLRSLLEEVIRLLEENEKLVRRHLKTVIDILRRVAKLLDENGIRTDEADRVLERLEKAHRELLEDYKRALEKIKETLERVLREAEEVVKKIDDALRKLGGSKEVLKRLLEELLRLVEKIAEEIKRLLSELVRVTEELVRTNKELLEEAVRVIRKEVGDDSLVREVEELIKRLEKHIDDLLKTSRDLVKRVLDLVDEVVKRVEDLVERVKEKIDT

SEQ ID NO: 14247 - protein, 232 aa, Artificial Sequence; identical to SEQ ID NO: 14246
  Synthetic

SEQ ID NO: 14248 - protein, 232 aa, Artificial Sequence; identical to SEQ ID NO: 14246
  Synthetic

SEQ ID NO: 14249 - protein, 232 aa, Artificial Sequence; identical to SEQ ID NO: 14246
  Synthetic

SEQ ID NO: 14250 - protein, 247 aa, Artificial Sequence
  Synthetic
DEERLAEELERVLDRNRKLLEEALRELRRVIEENRKSVKRLLDELKRVLDELLKVLRELSRGDSDEELRKVIEDLIRKLTKVLDKVRSLVEENIERLARVLEKLERLARENLEDLKKVLDDVDKKLKDRRLVERLAELVRELIEVNKEILEMLKEIVRELLEINRTLLERLKDLVATALEIIKLLARGDGTEEDVERAVKEIRDRLRKLLEDYERAVRRLEDKLRRVRERYEAVLKRIKDKLEETKR

SEQ ID NO: 14251 - protein, 247 aa, Artificial Sequence; identical to SEQ ID NO: 14250
  Synthetic

SEQ ID NO: 14252 - protein, 247 aa, Artificial Sequence; identical to SEQ ID NO: 14250
  Synthetic

SEQ ID NO: 14253 - protein, 247 aa, Artificial Sequence; identical to SEQ ID NO: 14250
  Synthetic

SEQ ID NO: 14254 - protein, 243 aa, Artificial Sequence
  Synthetic
SRVEELKKLIEDILRISREVVERIARVAEDIHRINRRVLDDLRKLIEDILRTVEEILARKVSGTEAAEALRDTIRRVVDEIRKLLEEHEKRSAELLEEIRKLLEDILRRSERAVEEIRELLKKGVSTKDVLRIIEEILREHLELLERVVRRIEEILRELLKTIEEIVKRIKEILEELKEVLKRGSVGDDEVEREIRRVKEDLDRILEEYRRLLEEIKRKLEEILRRVEELHRRLRRKLEEIDR

SEQ ID NO: 14255 - protein, 243 aa, Artificial Sequence; identical to SEQ ID NO: 14254
  Synthetic

SEQ ID NO: 14256 - protein, 243 aa, Artificial Sequence; identical to SEQ ID NO: 14254
  Synthetic

SEQ ID NO: 14257 - protein, 243 aa, Artificial Sequence; identical to SEQ ID NO: 14254
  Synthetic

SEQ ID NO: 14258 - protein, 244 aa, Artificial Sequence
  Synthetic
DEDRRLEDAVAKLRKEHADIMKKLDDIMRELDEDHARIKERLDRILEELKALLTRVLRETREDELLRKVLELLTRLLKLLADVLEENKRLLEDILRLLKELIETNLRLLEEILALLRKVARGPVSEEEAKRLVEEITRLLEASTEEARKLVETIKRLLEESLDKLRSLVEEIERRLRTVLEEIRRRGAPEEIERIIRRVIEVIREILDLVRKVNKKALRVIEEILEDLARVNKKAVDAIDELAK

SEQ ID NO: 14259 - protein, 244 aa, Artificial Sequence; identical to SEQ ID NO: 14258
  Synthetic

SEQ ID NO: 14260 - protein, 244 aa, Artificial Sequence; identical to SEQ ID NO: 14258
  Synthetic

SEQ ID NO: 14261 - protein, 244 aa, Artificial Sequence; identical to SEQ ID NO: 14258
  Synthetic

SEQ ID NO: 14262 - protein, 240 aa, Artificial Sequence
  Synthetic
DEVEELLKRVRELLKASEELVRKILEDVKRLLERSIEEVEDLLRKVEELLKRLLDLVERGGSLDEILRELVRLLKEIVRKVLELNRKLVEDVIRIAKRLLELNAESVKEWDRILKLLRDGTGDKEELLKDAEEALEKYERAVREILKELEEIIKEYVRRVEELLKELKDAVDKAKDEVRKGSGDEDLIRDVDRVLKEIMDLLRDLVRRTKELLEELLRLLEELVRAHKELVRSILDEIRK

SEQ ID NO: 14263 - protein, 240 aa, Artificial Sequence; identical to SEQ ID NO: 14262
  Synthetic

SEQ ID NO: 14264 - protein, 240 aa, Artificial Sequence; identical to SEQ ID NO: 14262
  Synthetic

SEQ ID NO: 14265 - protein, 240 aa, Artificial Sequence; identical to SEQ ID NO: 14262
  Synthetic

SEQ ID NO: 14266 - protein, 247 aa, Artificial Sequence
  Synthetic
SEAEELLRELEELLKKSEKVLEDLLRKNAELIKDSKARLDEVRRKVEKLAEEVEEVIRRGVSEEELIRVIKKVLDDLRSIIKELIEVSRKYLRTTLELVKELLDVSRDVLREVLRIIKALLDTGGKDGSEEKIKEIADVADEIRKLAEEDIRLIKKLLEESAKLVDEDVRKLEEIAKEITELVERLRRTGDKDAVRKLIEELKKLLEDLVEHHERLLKEDHERLKALLDHHRELLKTVLTILRETAK

SEQ ID NO: 14267 - protein, 247 aa, Artificial Sequence; identical to SEQ ID NO: 14266
  Synthetic

SEQ ID NO: 14268 - protein, 247 aa, Artificial Sequence; identical to SEQ ID NO: 14266
  Synthetic

SEQ ID NO: 14269 - protein, 247 aa, Artificial Sequence; identical to SEQ ID NO: 14266
  Synthetic

SEQ ID NO: 14270 - protein, 245 aa, Artificial Sequence
  Synthetic
DEEELLRRVTEELKRLLDEARKLHEDVKRELEKLLKENDDLLADVKRKLESLLEALKRGSGTADEVIERILRLVEELLKRHAETVERILKLVRDLLRLHEKLVKEILDLLTRLLELLERRGGSGNSEKVDALKKLAKSVVDEVERSLEELRRLVEEVIKRIRDSLRASARIVKEAVRELRELLRDGRDADKLLERIRALLETLLEVLKRDNEEIKRILEELLRVAEENLRRIKEIIDRLLDATRR

SEQ ID NO: 14271 - protein, 245 aa, Artificial Sequence; identical to SEQ ID NO: 14270
  Synthetic

SEQ ID NO: 14272 - protein, 245 aa, Artificial Sequence; identical to SEQ ID NO: 14270
  Synthetic

SEQ ID NO: 14273 - protein, 245 aa, Artificial Sequence; identical to SEQ ID NO: 14270
  Synthetic

SEQ ID NO: 14274 - protein, 249 aa, Artificial Sequence
  Synthetic
DAEEVVKRLADVLRENDETIRKVVEDLVRIAEENDRLWKKLVEDIAEILRRIVELLRRGGVPEELLDRLAKVVKSIVEKAEKILERLNRVSKAIAEKLKTIVDELNEVSKEIVKRAEDILRKGKDKETVLRALRTLVKEYADLSKEVLERVERIVREYVKLSDEVVKSLAEIVEELIRIIEDLLRKGNLDEDVKRALEELVSRLRKLLEDVKKASEDIVREVERIVRELAKRSDEILKKLEDIVEKLRE

SEQ ID NO: 14275 - protein, 249 aa, Artificial Sequence; identical to SEQ ID NO: 14274
  Synthetic

SEQ ID NO: 14276 - protein, 249 aa, Artificial Sequence; identical to SEQ ID NO: 14274
  Synthetic

SEQ ID NO: 14277 - protein, 249 aa, Artificial Sequence; identical to SEQ ID NO: 14274
  Synthetic

SEQ ID NO: 14278 - protein, 240 aa, Artificial Sequence
  Synthetic
DKDKRLEELLKRLKELNDKTFEELERILEELKRANEASLREAERILEELRARIEGGNLDKRLAELLKKLLDDLKRLLEEYTRTNEELLKRLRELLERYRETNKKLLDLLRKLLDEARRTGTDEDLLRRLEDILRKYEDEVRRLLKELEDILREYEDTSRRLLEELERIAKEAAERVSRGSDKDVKDIIRTILEVARDLLRLLEEDSRTNSEVVKRLLDLLREDSKANSEVVKRLLDVLRE

SEQ ID NO: 14279 - protein, 240 aa, Artificial Sequence; identical to SEQ ID NO: 14278
  Synthetic

SEQ ID NO: 14280 - protein, 240 aa, Artificial Sequence; identical to SEQ ID NO: 14278
  Synthetic

SEQ ID NO: 14281 - protein, 240 aa, Artificial Sequence; identical to SEQ ID NO: 14278
  Synthetic

SEQ ID NO: 14282 - protein, 240 aa, Artificial Sequence
  Synthetic
SKEETLKRLLDELEKRNRETVERLERLLKELEDRNRASLEELEAVLEELERKIEESGLSKELKDTLARILEELRKLLEEYFRKNEELLRLLRKLLDEYARTNEELLRLLEELLDTARRTGGDSELLKRLEDIAREYEKRVRRLLEKLKDILDKYRKTVEELVRKMEEILKEAKKTISRIGSEEVKDIVRAMEEVIRRLIEILRRDVELNLDVAKKLLELLKEDSKLNLDVARELLELLDR

SEQ ID NO: 14283 - protein, 240 aa, Artificial Sequence; identical to SEQ ID NO: 14282
  Synthetic

SEQ ID NO: 14284 - protein, 240 aa, Artificial Sequence; identical to SEQ ID NO: 14282
  Synthetic

SEQ ID NO: 14285 - protein, 240 aa, Artificial Sequence; identical to SEQ ID NO: 14282
  Synthetic

SEQ ID NO: 14286 - protein, 243 aa, Artificial Sequence
  Synthetic
DEEETLRRLLERKVELAKEYLDVSKEVIDRTTKLLDEYLKTSKRIVDATVELLERGDLGPDELIKRLAEELERSLRELEEEIKRLKRELEESLKKLKEIIDRLAEEAEKLLAVLKRGEGSEEEALRALASLVRELIEVLRENDERLRDVLRRLIEALRKNNEILERVLRKLVRAAEERGRDESSREALEEARRRLEELLRELNEITKDLEAKLEKLLRDLNELTKALEEELKRLLDELKKRTD

SEQ ID NO: 14287 - protein, 243 aa, Artificial Sequence; identical to SEQ ID NO: 14286
  Synthetic

SEQ ID NO: 14288 - protein, 243 aa, Artificial Sequence; identical to SEQ ID NO: 14286
  Synthetic

SEQ ID NO: 14289 - protein, 243 aa, Artificial Sequence; identical to SEQ ID NO: 14286
  Synthetic

SEQ ID NO: 14290 - protein, 243 aa, Artificial Sequence
  Synthetic
SEAERTKESLKKVLKALVDLNRELLRKLEENMRELTKLNEEVKRALKEVLDKVREGGIVDKDAEREAERLMRELDKSSEDTARETRKLIEESKKSTRRTEEEARKLTETLDRLAKGGLPREDLLRALVRLLEELARLIEEDVRRNAELVKRHIELVERDVAELLRLIKELVDLLADLAEKGSRTEEIRKIVEEILKEIKELADRYREEVRKSKDKLRSILEDYKRKVDELKERLRELIEEVET

SEQ ID NO: 14291 - protein, 243 aa, Artificial Sequence; identical to SEQ ID NO: 14290
  Synthetic

SEQ ID NO: 14292 - protein, 243 aa, Artificial Sequence; identical to SEQ ID NO: 14290
  Synthetic

SEQ ID NO: 14293 - protein, 243 aa, Artificial Sequence; identical to SEQ ID NO: 14290
  Synthetic

SEQ ID NO: 14294 - protein, 239 aa, Artificial Sequence
  Synthetic
SEVEDILRRLAELNKRLIDKLRELIDRIARLNEELLRVVEDILSRLKRLADELIRVVRERGDIPEELLRKLEEELKKIVDELRRLVEEYEKALRDLIKELRKAVEEYRRTLAELVERLRRLEGPEELLKDLAEDVSRNIKAVEEVIRRFEKNVEDNIEVVRRLVDALEKLVRRLESVLRGKGSDEDLKRLLEKLKEDVERVLKEVRDRTAESLKHLEDVIRELEKKTEDSLRHMEERRK

SEQ ID NO: 14295 - protein, 239 aa, Artificial Sequence; identical to SEQ ID NO: 14294
  Synthetic

SEQ ID NO: 14296 - protein, 239 aa, Artificial Sequence; identical to SEQ ID NO: 14294
  Synthetic

SEQ ID NO: 14297 - protein, 239 aa, Artificial Sequence; identical to SEQ ID NO: 14294
  Synthetic

SEQ ID NO: 14298 - protein, 243 aa, Artificial Sequence
  Synthetic
DEERIIKTLEDINAKLVEDIKRILDKVAELNERLADAIRKILEETKRILEATTRKVRKDGEISEELLRRLEEKLRKLLEDLERVLAEHEDESRRILEEVERLLKRHADASKELLDRARSVARGVKSDKELVDRLKKLIDDSLESVRELIERLKELLDRLVKSVEDLIRTIKELLDRLVEVLREGVSDKDTLRTVEKLVEDVKRRLDKLLEDYKRLIEEVKKELDKLLKEYEDALREIKKRIDE

SEQ ID NO: 14299 - protein, 243 aa, Artificial Sequence; identical to SEQ ID NO: 14298
  Synthetic

SEQ ID NO: 14300 - protein, 243 aa, Artificial Sequence; identical to SEQ ID NO: 14298
  Synthetic

SEQ ID NO: 14301 - protein, 243 aa, Artificial Sequence; identical to SEQ ID NO: 14298
  Synthetic

SEQ ID NO: 14302 - protein, 232 aa, Artificial Sequence
  Synthetic
TEEEVVEDVKRVLDESHDDLRRLIETLTRVLRESLKRIKEALEELERVLKKLLDLLEGGRDAREVLDEIRKVLERLREVIEELLRINKEVLRELERVIRELLKKNEDLARRVRSGVKSRLLEVLERLARESLELNRAILEELRKLVEKSLRAVEKILKRLEEIVRKLLKLVEDGGPREEVKRVLEEARDELRRLLEEYKAIIEELERELERLLREHREVIRRIKEEIDKSSK

SEQ ID NO: 14303 - protein, 232 aa, Artificial Sequence; identical to SEQ ID NO: 14302
  Synthetic

SEQ ID NO: 14304 - protein, 232 aa, Artificial Sequence; identical to SEQ ID NO: 14302
  Synthetic

SEQ ID NO: 14305 - protein, 232 aa, Artificial Sequence; identical to SEQ ID NO: 14302
  Synthetic

SEQ ID NO: 14306 - protein, 234 aa, Artificial Sequence; identical to SEQ ID NO: 13912
  Synthetic

SEQ ID NO: 14307 - protein, 234 aa, Artificial Sequence; identical to SEQ ID NO: 13912
  Synthetic

SEQ ID NO: 14308 - protein, 234 aa, Artificial Sequence; identical to SEQ ID NO: 13912
  Synthetic

SEQ ID NO: 14309 - protein, 234 aa, Artificial Sequence; identical to SEQ ID NO: 13912
  Synthetic

SEQ ID NO: 14310 - protein, 240 aa, Artificial Sequence
  Synthetic
SLEEIVKKLEDLNKKAVEILRRVLEEHEKLVEKVKKVLRDVLRLLEKVVREVIETLKKGDTDEKTREALKELEEVVRKIKEEVEKVLKRLEEVSKRLKDEVRRVLKESEDVAKKIRRDVRGVRSEDAAKRATDLLKETLTILEEAIRRIVKVIEDSLEILREAVEAIVRLLEELLSILARIGLDEEVLRKLKEIIKELKDRLKKLLDDYERIIDELRAELERVLREYEKILEDLRKELED

SEQ ID NO: 14311 - protein, 240 aa, Artificial Sequence; identical to SEQ ID NO: 14310
  Synthetic

SEQ ID NO: 14312 - protein, 240 aa, Artificial Sequence; identical to SEQ ID NO: 14310
  Synthetic

SEQ ID NO: 14313 - protein, 240 aa, Artificial Sequence; identical to SEQ ID NO: 14310
  Synthetic

SEQ ID NO: 14314 - protein, 241 aa, Artificial Sequence
  Synthetic
SADEALEELVRRLLEVLKTVLERTKELSRDDLRVVKEVLRIIEELVKRLLKVIRDGLDDADRVLEEVERVIREAKREVKRWEEVVRKVVEDSRRLIERVLAEVEEVIKEAKRLLDERKSGGSREVIEELLSLLREIVRHHKEVSDEHLKLSAELVKRILDVVEETLRLATEIVRRIKEGGNSEDVRRDIERLLEELKRRVERLLEDIERLLAELEKLNEDVLRENKALLEDLERRVRERKK

SEQ ID NO: 14315 - protein, 241 aa, Artificial Sequence; identical to SEQ ID NO: 14314
  Synthetic

SEQ ID NO: 14316 - protein, 241 aa, Artificial Sequence; identical to SEQ ID NO: 14314
  Synthetic

SEQ ID NO: 14317 - protein, 241 aa, Artificial Sequence; identical to SEQ ID NO: 14314
  Synthetic

SEQ ID NO: 14318 - protein, 58 aa, Artificial Sequence
  Synthetic
DEVRKVLKDVTELSKTSEDKLEKVVREVKRKLDEVNRDLERVVREAKKLLREVRERLE

SEQ ID NO: 14319 - protein, 59 aa, Artificial Sequence
  Synthetic
DEVDEIRRRLKKLLDDSRKTSKDIERRLRELLDRNRRLVERVEEELRKLIKELEELVRS

SEQ ID NO: 14320 - protein, 58 aa, Artificial Sequence
  Synthetic
EEVEKVLKEARDVSEDSKRETTEVLKEAKKALEDINKRLREIVETVREALERVERALT

SEQ ID NO: 14321 - protein, 59 aa, Artificial Sequence
  Synthetic
DEKETVKDVVRRLVEKLEEVVKESKKLVDDLVKRAKEIVRESEELVRRNVRRAEEVARE

SEQ ID NO: 14322 - protein, 55 aa, Artificial Sequence
  Synthetic
EKVLKELEDAVREVKERIKKTNKELEEMVRRVEEEIRESDERLKKASEEVEEKIR

SEQ ID NO: 14323 - protein, 59 aa, Artificial Sequence
  Synthetic
SEMETVLDDVRRVVEESEELVKRARDRVKKLVDDLKRLVEKNEEDVKRVVDELDKLVEK

SEQ ID NO: 14324 - protein, 56 aa, Artificial Sequence
  Synthetic
EEVLEEARRLSERSREELRRVLEEARRLIRRVREELKRVHDKARRLVERVEEKLRT

SEQ ID NO: 14325 - protein, 59 aa, Artificial Sequence
  Synthetic
DEVEEVLERVKKVVADSEELVKRNRERVKKVVDDIRDLIRRNAETVKEVVKTIRELVKK

SEQ ID NO: 14326 - protein, 56 aa, Artificial Sequence
  Synthetic
EEALKDAERRSDESRKKLKKVHDDADRMVREVTRRLDEVHKEAEKRVREVLAELDT

SEQ ID NO: 14327 - protein, 60 aa, Artificial Sequence
  Synthetic
SIEEVLKEAHELNKEANKRLRDVEEDAKRLIEEVLRRLEDVLRESERLAREVLEELKRKG

SEQ ID NO: 14328 - protein, 56 aa, Artificial Sequence
  Synthetic
AKELRRRVERSVEESKRLVDELRKDVKRVVDEIRKVVEEDLRHAKRVVDEIREKVR

SEQ ID NO: 14329 - protein, 59 aa, Artificial Sequence
  Synthetic
DEAEEVKRVVEESVRRNEELVRRNEELVRDVLRRLKEVVDENERLVKEVVDRLRDLVRR

SEQ ID NO: 14330 - protein, 56 aa, Artificial Sequence
  Synthetic
ERVLKEVEELDRRVLEELKRVNDEARKRVRTLLEELRRVNEKVEELVRRILEELKK

SEQ ID NO: 14331 - protein, 57 aa, Artificial Sequence
  Synthetic
DEAEDVVRKVMDEIRKLIEVSKEILKELRRLVEELKKHSDRTVEELRRVVTELLKKE

SEQ ID NO: 14332 - protein, 55 aa, Artificial Sequence
  Synthetic
TDAVRRVRELLETVRRTSEEVLKTLEEFLRRVEKSTRRAEEELEEFLKRVEDRVK

SEQ ID NO: 14333 - protein, 61 aa, Artificial Sequence
  Synthetic
KEADKLAKELEETIERLKRDSERLVTDLERLLERLERRSRELVKRLRRHVEELLKTVRRDG

SEQ ID NO: 14334 - protein, 55 aa, Artificial Sequence
  Synthetic
REVIKKVEDLLREVEETSKRILDRVRELLKKVEDSSRRINEESKKLLKRVEEEAR

SEQ ID NO: 14335 - protein, 58 aa, Artificial Sequence
  Synthetic
SELEKILEDLKRVAERVAKALDRSLRELEKVLRRVEEELTRSNERLREVVKEVEDAAD

SEQ ID NO: 14336 - protein, 56 aa, Artificial Sequence
  Synthetic
DEEVRKLVEDLARRLDDIVRRSEELSRKLAEDVEEIVERSKRLSEELAREARELVR

SEQ ID NO: 14337 - protein, 60 aa, Artificial Sequence
  Synthetic
SEIEDVVRKVETLARESDERVKTLMEENKDLAEKLKKLVRDVVEKVKREVTRLLDEVRRR

SEQ ID NO: 14338 - protein, 58 aa, Artificial Sequence
  Synthetic
EELKKVKERLDEAERRSKELIDEADRLNREMLKRVKEAIKKVKETLDKALEDVERAVR

SEQ ID NO: 14339 - protein, 57 aa, Artificial Sequence
  Synthetic
SDLERVEERLERAVREVEKLHEDSRRELRRVVKEVHDSTRKVEERNRKLVKRVEEAD

SEQ ID NO: 14340 - protein, 55 aa, Artificial Sequence
  Synthetic
KKVIKKLEDMLREWAKLVEKSIKELKELLEELRKVSKKLVDDNDRLAEELKRRVD

SEQ ID NO: 14341 - protein, 61 aa, Artificial Sequence
  Synthetic
DEVKALVDKVRELVRKLKEESDDLVRRNEELAKEVEKRSREVVEKVRDTVRKLLEELERAD

SEQ ID NO: 14342 - protein, 55 aa, Artificial Sequence
  Synthetic
KKVRDDLRKALEDVNRSSKRVEERDKEVLDEAHRSSTRVLETLKRMLERLDEKIR

SEQ ID NO: 14343 - protein, 61 aa, Artificial Sequence
  Synthetic
DEVEKLVKKVEDLVKRLIEVSEDVVREVEKRLRELEKVHREALRKNRKLLEDLLRRLREAD

SEQ ID NO: 14344 - protein, 55 aa, Artificial Sequence
  Synthetic
DKVREKLKRALDRVNKSSREVEETLRRADKRLNDLVKEIKDEDKRMLERLERETQ

SEQ ID NO: 14345 - protein, 61 aa, Artificial Sequence
  Synthetic
KEVEELVKEVRKLATKVIETSKRVVEELEKLAERLLRTSKEVVKRNKELVDDLLRRVREVS

SEQ ID NO: 14346 - protein, 55 aa, Artificial Sequence
  Synthetic
EEVRKELRELLRRVNESSKDVKRRLEDLDREINRLSKRVKEEDRRALKEVEEEIK

SEQ ID NO: 14347 - protein, 60 aa, Artificial Sequence
  Synthetic
SKEEEVKRVLREALERVEELNKRLNEEDKRMLDEVRKVNRDAERVLREALKRVEELLSRV

SEQ ID NO: 14348 - protein, 55 aa, Artificial Sequence
  Synthetic
DELVTDVERVVRELLDHVRRLVRESKELARELIRRSEEIVRTVEEVVRKLEKDVR

SEQ ID NO: 14349 - protein, 60 aa, Artificial Sequence
  Synthetic
DKAKKVEELLRKAIEEVEKLNDEVNRTDEKMLRRVKELNDDVHRTLEEAIKRVRELLSRV

SEQ ID NO: 14350 - protein, 55 aa, Artificial Sequence
  Synthetic
DEVVTEVEKLMRELLEHVKRLIDESRKLAADLEKHSRDIVEEVRRLVEELLRTVK

SEQ ID NO: 14351 - protein, 60 aa, Artificial Sequence
  Synthetic
SKERDVERKVREVIKRVEDLNKRVHKTLEDVIREVEKLNEEVKTRVEKLIREVEELLKRV

SEQ ID NO: 14352 - protein, 55 aa, Artificial Sequence
  Synthetic
DRVVEEVERLLRELEKHSKEIEEAVDRLVRKLEEHVKKVVEEVARLVAELKERVK

SEQ ID NO: 14353 - protein, 60 aa, Artificial Sequence
  Synthetic
SVAEEVKKVKDKLKKDVERLNEEDRRVLEKAKRESKKLLDEIKRVLEELERKLEELLRRD

SEQ ID NO: 14354 - protein, 55 aa, Artificial Sequence
  Synthetic
KEVVTEIRRVVKELLDKVRESIKETERVVRELLERNRKILKEIREVVRKLLEDVR

SEQ ID NO: 14355 - protein, 61 aa, Artificial Sequence
  Synthetic
DEARKLLEELKRLAERVLKTDTDLLDESRRILEEVLKTNKKSIEDSKRLAEDVLRKVAREG

SEQ ID NO: 14356 - protein, 59 aa, Artificial Sequence
  Synthetic
EEVLDRVREIMERVLTESKELNDRIHTISRKAEEDSKRLNEEDRAIMEDVRRELKRVVD

SEQ ID NO: 14357 - protein, 61 aa, Artificial Sequence
  Synthetic
SEAEKLLEELRTIAKEVLDRVRKMLRESEKLAEDVLRENKKSIEDSRRIAKKVLDELRRDG

SEQ ID NO: 14358 - protein, 59 aa, Artificial Sequence
  Synthetic
EEVLERIRRIFEDVLRKLRKLLDEIHRISEKVKKESEELNEEDKRIVDDAERRLEDLER

SEQ ID NO: 14359 - protein, 60 aa, Artificial Sequence
  Synthetic
SVKDAVEKILREAEETVKRLNEETKRRLDEAREESKRLIDEVRRILEKLKEVLDEVLRRV

SEQ ID NO: 14360 - protein, 55 aa, Artificial Sequence
  Synthetic
EELLERVKRLMDELEETSRRILEEVERVIRRNKELADRILKEVAELLKRLEEELR

SEQ ID NO: 14361 - protein, 60 aa, Artificial Sequence
  Synthetic
DEAEELRKTVEDIMKELREELKRLEEESRRIMEELKKRLEKLIEDSRKAAEDLKREADRL

SEQ ID NO: 14362 - protein, 59 aa, Artificial Sequence
  Synthetic
KRLLEEIKERVDRVKKELDEADKRINDSSREVEKTLEDLDRKINKSSEEVRRVLEEAER

SEQ ID NO: 14363 - protein, 60 aa, Artificial Sequence
  Synthetic
DVEETLTRLLKEILDVVRKALRDTREIVRDVRRVSEEVLKELEDLLREVDREVKRVLAEL

SEQ ID NO: 14364 - protein, 56 aa, Artificial Sequence
  Synthetic
DTEVVKRIRELVEKLRELVKRSNDNLKEHVKRNKELAKRLLDELRKLVEDLKRARK

SEQ ID NO: 14365 - protein, 60 aa, Artificial Sequence
  Synthetic
DMEEEVKKLIDEVRRVLEEVLKRVEDIIDASRRTLKKVVDDVRRIDEDVERELKEAEKRG

SEQ ID NO: 14366 - protein, 56 aa, Artificial Sequence
  Synthetic
KEEVLREVDRLVKKVEKTARELLRLLEESIEKSKREAEKLLRSNEDVVRRVRERVR

SEQ ID NO: 14367 - protein, 56 aa, Artificial Sequence
  Synthetic
DAEEDAKRLLKEVKDLLDEVRERHRELNERSRKVLEDARKTHEDLNEESRKTLEDR

SEQ ID NO: 14368 - protein, 55 aa, Artificial Sequence
  Synthetic
REARELLKRILKDIERILETVVRLSERDVEEVRKIMEELKKLSDDDLKRVEEEAR

SEQ ID NO: 14369 - protein, 56 aa, Artificial Sequence
  Synthetic
SAREEIEELIKRVKDTSKKILEDVRRMIERVKRKSKKIKEDAKRLIERVEKLLRDS

SEQ ID NO: 14370 - protein, 56 aa, Artificial Sequence
  Synthetic
KDELRELIKRLEDHSRRVVEEVARLVKELDEHSERVLKTLEDLIRRLDELVKRVTT

SEQ ID NO: 14371 - protein, 57 aa, Artificial Sequence
  Synthetic
KAEETVKELLDRVERISERARKEVRELLERSKESTKRILDEAREMIKRSRDELRRVG

SEQ ID NO: 14372 - protein, 56 aa, Artificial Sequence
  Synthetic
LEDLERLARELARHSEDVMRRLRDLARKDKELSEDLVRRLRELVKRDLDLVKTVKE

SEQ ID NO: 14373 - protein, 56 aa, Artificial Sequence
  Synthetic
SMEDRLREVNEKNNRLIEDATRKSERVLDKIRELLKEVKRRSEDVLRRIKELVEKL

SEQ ID NO: 14374 - protein, 59 aa, Artificial Sequence
  Synthetic
EKTLKELVEKIEKVAEDSLREAEEDVKRIEDLVREIKKRADDDVRRLEDRVRRLRERLE

SEQ ID NO: 14375 - protein, 59 aa, Artificial Sequence
  Synthetic
SSVEEVVEEIERLVDELRKRAEELVRESEKLVAELERRIRKLVEDSEKLVKDLKDRAAK

SEQ ID NO: 14376 - protein, 59 aa, Artificial Sequence
  Synthetic
DKVLRKIEDVDRRLKELVRRVKKKDRDSNERVKELVKRLNDENEKVLKRVEELVRRDKT

SEQ ID NO: 14377 - protein, 60 aa, Artificial Sequence
  Synthetic
DEIKKVVKDLEDLVKRLKDEVDRHVRENERIVEELKRNVDRHVEENRRLVKTLEDEVRKG

SEQ ID NO: 14378 - protein, 55 aa, Artificial Sequence
  Synthetic
EDLKRVLKAVEDVVREAKERLERVNRTIREVVKRAREKLKRVHDTIRKVVDDARR

SEQ ID NO: 14379 - protein, 59 aa, Artificial Sequence
  Synthetic
DEVEEVLKELKRSVDETRKLLKKIEDEAKRNVRRNEELAERVKRTVDRLVEELRDLIRR

SEQ ID NO: 14380 - protein, 55 aa, Artificial Sequence
  Synthetic
EKLKRAEKEDEEVVRRIRELIERLREENEDVIRRAEELLREVVKRIEEVITEARR

SEQ ID NO: 14381 - protein, 60 aa, Artificial Sequence
  Synthetic
SVEDEIRRVIEELDRLLRKDKETIKRVIKELRDLLREVKKRTEEMIRRLDELLETVTRRI

SEQ ID NO: 14382 - protein, 56 aa, Artificial Sequence
  Synthetic
VDDVRRLAKEVLDEVKKSVDETKRLADEVKTRVRKNVKDNTDLAREVLRRVAERAR

SEQ ID NO: 14383 - protein, 60 aa, Artificial Sequence
  Synthetic
SRLEKLVKEIRDVVRELAERVKESVDRARKVVKEDLEHAEESVRRVKKVVKELEELVRKL

SEQ ID NO: 14384 - protein, 55 aa, Artificial Sequence
  Synthetic
KDIKEVEKRLKDVLDEAHKLNKRTNDELKRVNKESNDLNRKTEEDLKRVLERAED

SEQ ID NO: 14385 - protein, 59 aa, Artificial Sequence
  Synthetic
KRKEDLVEEIRKIVKAVEDEVRRSVKESEDSVRENLKEAERIVRELEEIVKELEKLVRD

SEQ ID NO: 14386 - protein, 55 aa, Artificial Sequence
  Synthetic
ELLEDVRKKLEDVLREVEKLNKTVEDKNREVLRRIDELIRRVEEAIEDVRRKVEK

SEQ ID NO: 14387 - protein, 59 aa, Artificial Sequence
  Synthetic
DEKEELVKRVEDKVKDLRDKVEKSVRESTESVRDNERRVRESVERSRDLVRRLDELVRA

SEQ ID NO: 14388 - protein, 55 aa, Artificial Sequence
  Synthetic
EELERVRKELEEVLRRAKRLNEDVLEKNREVVRRAAELNKEVKKLLKEVLDRAKT

SEQ ID NO: 14389 - protein, 60 aa, Artificial Sequence
  Synthetic
DEKEDIDRRLRDMVRRDRELARRSVEEARKLVDKNRKLVERVFRELKKLVDELDELVRRR

SEQ ID NO: 14390 - protein, 55 aa, Artificial Sequence
  Synthetic
KLLKDLEEELRKTREEVHRLNEETNRRLDKVNKDARDLVRELEELIEDVLRKVET

SEQ ID NO: 14391 - protein, 59 aa, Artificial Sequence
  Synthetic
DEKETVEERLDRLVRHHEKLVRESVKELEELVRHNRELIKKSVEDARRLVEDLKRLIDE

SEQ ID NO: 14392 - protein, 55 aa, Artificial Sequence
  Synthetic
KLLDELRERIDKVNEDARKLNEEVERRITESEKEVTDLNRKVDEDIKRVLEKVER

SEQ ID NO: 14393 - protein, 60 aa, Artificial Sequence
  Synthetic
SVEKVVKDVTDTIKKVVDDARRLSEEVVERNERVNKKLERLSREVVERIKDVLKRLRDKK

SEQ ID NO: 14394 - protein, 56 aa, Artificial Sequence
  Synthetic
VEDLKRDADRIVEDIKRVVKELVKHAEKSVEDLERVVKEIVKDAERIVREIEKRVK

SEQ ID NO: 14395 - protein, 60 aa, Artificial Sequence
  Synthetic
DVEEVVRRAREENKRSHDEVRELVKEVNERNKTVLERIKELAERALREIREVLREVDERK

SEQ ID NO: 14396 - protein, 56 aa, Artificial Sequence
  Synthetic
TEKLKEDLDRIVRTSEELVRRLLERARRMVRETEELMRELLTEVKRIVEEVARRVK

SEQ ID NO: 14397 - protein, 59 aa, Artificial Sequence
  Synthetic
DKEELLKRVTEKLEKVSDKSRRLIEEVEREVEKVHREVEERVRKVREDVRDVLRKIRAQ

SEQ ID NO: 14398 - protein, 56 aa, Artificial Sequence
  Synthetic
TELVLREVERLVAENERSVEELKKELEKLVRRNRTLVRKIEEDVRRLVEKITKRRE

SEQ ID NO: 14399 - protein, 59 aa, Artificial Sequence
  Synthetic
SDSERVKKEAEDVLREIKRLIERNKRLAEETSERIRRLLEELKDLADKIVETLKDLIDR

SEQ ID NO: 14400 - protein, 56 aa, Artificial Sequence
  Synthetic
REVVDEVEKRIRELLERLKDVSKKVEESNKKLLDEIRETVERVKKRIKELLEELRR

SEQ ID NO: 14401 - protein, 60 aa, Artificial Sequence
  Synthetic
SLEEVVEEVKRRLTKLLKEIEDVIRRAEEESRRLLEEIERVIREAEKESRRLLEEIRTAG

SEQ ID NO: 14402 - protein, 56 aa, Artificial Sequence
  Synthetic
EDLVRKLAKELLDTLREVLKRIEEIAKEVLDLNDESLKEIRRIVEEDLRKLEEKMR

SEQ ID NO: 14403 - protein, 59 aa, Artificial Sequence
  Synthetic
SEEEEVKRLLDDVREKVKRVAEENRRTVEEVKRVVDEVRRRNKETVERDRRELEKVARD

SEQ ID NO: 14404 - protein, 55 aa, Artificial Sequence
  Synthetic
EEVVREIRRIVEDVRRKVKESVDRVKKILEKVRKDVEDSVREVERTMKKVSDDVT

SEQ ID NO: 14405 - protein, 63 aa, Artificial Sequence
  Synthetic
SKEETAKRLIEEVRKVIEEVKKRAEDSNDHNRRSIEEVEKTLKRLIDEVRRVVEEVKEKISRT

SEQ ID NO: 14406 - protein, 55 aa, Artificial Sequence
  Synthetic
KEAVEEIERLMRKIKKVVEDSVRNVERTMREVEEKVRKVEEDVRRLAEDVTRAVK

SEQ ID NO: 14407 - protein, 56 aa, Artificial Sequence
  Synthetic
DEVEEVLRRVRKIVKEDRDEAKDVREENRRLVEDDKRKVERVKEENRRLVEELRKR

SEQ ID NO: 14408 - protein, 56 aa, Artificial Sequence
  Synthetic
RRLLEEVERRVEKLVKESREIAKRSNDRTKDLVRRSEEILRESNERTRRLLEETER

SEQ ID NO: 14409 - protein, 56 aa, Artificial Sequence
  Synthetic
SEAEKVLKDIEKIVKDLERNAKEVLDRNKRNVEDDKRAAEEVLEKLERIVREIDRG

SEQ ID NO: 14410 - protein, 56 aa, Artificial Sequence
  Synthetic
RELLKKVIRTVEKLLEDVHKLNEDSERAAKKLTDESREIAREVEERVERLLREEER

SEQ ID NO: 14411 - protein, 57 aa, Artificial Sequence
  Synthetic
REVEEAEKRLREIVKEVTERNKEVVERLRDIVRKSEDDSRKSVETNKEIVDRVRRDV

SEQ ID NO: 14412 - protein, 56 aa, Artificial Sequence
  Synthetic
RDVLRELIRTLEEVLKRSEDTNRELEKRIKEVVEDNRRKLEESIKESEKVVDEIRK

SEQ ID NO: 14413 - protein, 57 aa, Artificial Sequence
  Synthetic
SEVEEAERRLKEIAEESKEISKRSVETNAKILDEVRRENTRVLETLKKILEEVERRV

SEQ ID NO: 14414 - protein, 56 aa, Artificial Sequence
  Synthetic
KDELERLIEDIREVVERNKKIADESIKRSRDVVKRSKETNDELEKTIREVVKRIED

SEQ ID NO: 14415 - protein, 57 aa, Artificial Sequence
  Synthetic
DEVEEVLKRLRDILREAKELVERSVKRNEEIAEESRKESEESVRRNEEIVDAVRKRV

SEQ ID NO: 14416 - protein, 56 aa, Artificial Sequence
  Synthetic
RRVLERLIRELERVLEELREKLKRSIEESEDVVRKNREILRRSIEKSEDVVRKIET

SEQ ID NO: 14417 - protein, 59 aa, Artificial Sequence
  Synthetic
DVDEVLDTVRRLVEELLKKVERTSRESVRLAEKLLDEVRESSKRSKDESRRLLEEVREI

SEQ ID NO: 14418 - protein, 59 aa, Artificial Sequence
  Synthetic
REKVDKVRRDVERLVEEVEKTVKRSVEENRRIAEEIKRTVEESVKTNEEVVKRIEETAR

SEQ ID NO: 14419 - protein, 58 aa, Artificial Sequence
  Synthetic
RERELVEEVERRLRESNERVKESVDRSRKLLETSHRRVKELVDRLKRVLERVEREVRN

SEQ ID NO: 14420 - protein, 55 aa, Artificial Sequence
  Synthetic
DELVKRVKEVVDHNERLAEESKKEVDDVVRRNEDLVRKVVEEVKDVVRRIKETVR

SEQ ID NO: 14421 - protein, 58 aa, Artificial Sequence
  Synthetic
RERELVEEVERELKRSTREVEESIEESRKRLEESHRLVAELVKRLEEVLERVRDDVRR

SEQ ID NO: 14422 - protein, 55 aa, Artificial Sequence
  Synthetic
DELRKRVEEVVRTNEELARESVRKVKEVVRRNKELVARVADKVREVVKRIRETLK

SEQ ID NO: 14423 - protein, 59 aa, Artificial Sequence
  Synthetic
SVKEIVKKVVEENKKSDDELREFARRVAERNKRVVEELKKRLEDLVRKNEEVVDRLRKR

SEQ ID NO: 14424 - protein, 59 aa, Artificial Sequence
  Synthetic
SEIVKEVVDRVRKSEESSRKLLEEIVRLVEKSLEEVKRILDEIRRRVEKSERDVRRLRK

SEQ ID NO: 14425 - protein, 57 aa, Artificial Sequence
  Synthetic
DIVEELKENVKRVEETIRKIVKEARENVDDVLKKNKDNVEHDKRTAEEVLKEVKKSI

SEQ ID NO: 14426 - protein, 60 aa, Artificial Sequence
  Synthetic
KDTVRRLLEEASKLNKDVIRRVRELLKRLHERNEESLRRARELNERSRREAERVLEEVRK

SEQ ID NO: 14427 - protein, 60 aa, Artificial Sequence
  Synthetic
SIVDRIREIMKEVREKVKRVVEENRRNAERIKRRVDEVVKTNRKTVDDVRRKVEDVVRKI

SEQ ID NO: 14428 - protein, 60 aa, Artificial Sequence
  Synthetic
REVVEELLRRLRKIVKDVERELKRSTEELNRRSREVLKELEKSTRDVEKVVRELEERLRK

SEQ ID NO: 14429 - protein, 60 aa, Artificial Sequence
  Synthetic
SVVDKIREIVRKSREDVRRVVEEIKDNARDLKRKAEEVVKEVKRIVDEVRETVRDVVEKI

SEQ ID NO: 14430 - protein, 60 aa, Artificial Sequence
  Synthetic
EEEARKLLEDVKKSSDDVRRELKRLLEEVNRVSREAEKKLRELLERVKRIIDTLKDELRK

SEQ ID NO: 14431 - protein, 60 aa, Artificial Sequence
  Synthetic
SVKDEIRRIVKESEEANRDVVEKIRRNVERIRRKVERVVEEIKRIVKEVKEKVEDVVRKN

SEQ ID NO: 14432 - protein, 60 aa, Artificial Sequence
  Synthetic
EEVVRKLLEEVKKSSDESKDRSRRLLEEVNRISRDVERKLEELLRKVEKVVRDLEEELRR

SEQ ID NO: 14433 - protein, 58 aa, Artificial Sequence
  Synthetic
SAEDVVRELKKRVDRSREDNTRVLEELKKAVEESRRLNEESNRRLEKIVRDIKEDLKR

SEQ ID NO: 14434 - protein, 59 aa, Artificial Sequence
  Synthetic
EEVLRELAKIREDIERENKRVLEELEDVLRKVKRVNEEALKNSEDILRDIKEKVDRRRK

SEQ ID NO: 14435 - protein, 59 aa, Artificial Sequence
  Synthetic
SVEELLRKLEEVLRKIREENERSLKELRDRAREIVKRNRETNRELEEVIKELEKRLSRR

SEQ ID NO: 14436 - protein, 59 aa, Artificial Sequence
  Synthetic
EDIVRKIERIVETIEREVRESVKKVEEIARDIRRKVDESVKNVEKLLRDVDKKARDRKK

SEQ ID NO: 14437 - protein, 61 aa, Artificial Sequence
  Synthetic
SEEEKVKEEIRKLIEDSRRHVDELKKRLEKLLRDSEKNVEDAHRTNEKLARELKEKVKKTG

SEQ ID NO: 14438 - protein, 55 aa, Artificial Sequence
  Synthetic
EDVLREAEEMLRDSNRELREILEKIERDLRKSDEELKKSVDDLRRLIKEVEDRLK

SEQ ID NO: 14439 - protein, 61 aa, Artificial Sequence
  Synthetic
SREEELKKELKKRIEDSDRHVKEEKDELDRLIRESEEHVKRLKEEARKKLERLKDLVRKDG

SEQ ID NO: 14440 - protein, 55 aa, Artificial Sequence
  Synthetic
EKVLREAEELLKEVDRKLERILEEIKRRLEKSDRDLRRVLKELEELIDEVRRRLE

SEQ ID NO: 14441 - protein, 61 aa, Artificial Sequence
  Synthetic
SEKEDIKERIKELLKRSEENVRKLREENRELVRRSEENVKEIHKENEDLIRKLEKLRTRDV

SEQ ID NO: 14442 - protein, 55 aa, Artificial Sequence
  Synthetic
EDVLREAKEALEESLRRLRKIHEDSERRLRESLEELRRSVEEAKRLLERLKRELD

SEQ ID NO: 14443 - protein, 61 aa, Artificial Sequence
  Synthetic
DELDRVIEEAEELIRRIEEKLRRINETAKRLLDENLRHSERVHEEINRALERVRKKVEDAG

SEQ ID NO: 14444 - protein, 56 aa, Artificial Sequence
  Synthetic
VKDVKDRLRRIIEELERRVRELKKRHEDILRELNRRSKELKDRHKKILEDLDRRVR

SEQ ID NO: 14445 - protein, 61 aa, Artificial Sequence
  Synthetic
EEVERVIDEARRLLRENERHSEEVIEEITKLIRDVEEKVKRINDRAREALEDIREEVKRKG

SEQ ID NO: 14446 - protein, 56 aa, Artificial Sequence
  Synthetic
VDELRKELERLIRDLNRLSKRIKEELKRRIEELEEEVKRLKEEHERIIEELRRRVK

SEQ ID NO: 14447 - protein, 59 aa, Artificial Sequence
  Synthetic
EEVERAKKELEDRIREWEEDSKRLKDELKRIIKEWEDESRRVKEELRKIIDDLRKAVEK

SEQ ID NO: 14448 - protein, 55 aa, Artificial Sequence
  Synthetic
ERILEEARRLVRRVHESSKRVLDDARRKLKELHERSKRVLDDVRRKLKKVADDTR

SEQ ID NO: 14449 - protein, 60 aa, Artificial Sequence
  Synthetic
SEVERIKEELKRIIEDWDRRSRRLKEELKKEIKDWEEDSRRLKRELEEELKKLKEKVERG

SEQ ID NO: 14450 - protein, 55 aa, Artificial Sequence
  Synthetic
KKIIDEARRLLEELHRKSREVAKEIRKEVKRLHDTSKKVLEDIRRAVKKVADDVK

SEQ ID NO: 14451 - protein, 59 aa, Artificial Sequence
  Synthetic
SEVEKIKRDLEEIIRRWEEDIKRVKKRLDEEIRRWEEESKKVKKKLEDLIRRLEKEVAD

SEQ ID NO: 14452 - protein, 55 aa, Artificial Sequence
  Synthetic
EKILEDARREAERLHKTSKDVLKKVEDLLRRVNEHSRRVLEEAERRIRDVAEKTR

SEQ ID NO: 14453 - protein, 59 aa, Artificial Sequence
  Synthetic
SEVEDIKRRLEKIIEDWRRKSKELEKRLEDIIDEWDKRSRKLKEDLKRIIEEARKAVDD

SEQ ID NO: 14454 - protein, 55 aa, Artificial Sequence
  Synthetic
EKVIKEAEDLLRELNESSRRVAKKAKDDLRELNERSRRALKEIRELLREVRERVE

SEQ ID NO: 14455 - protein, 61 aa, Artificial Sequence
  Synthetic
REVEKIITDLEEVIRRVEEYLKRSDEELEKELRRVKRYLDKSDKDLRDEIRRVKEELDKRG

SEQ ID NO: 14456 - protein, 56 aa, Artificial Sequence
  Synthetic
KDELRARVEDVVRRAEDELRRHSELNKRLVDEARKLLEDHSRRNEELMRELRKLVE

SEQ ID NO: 14457 - protein, 60 aa, Artificial Sequence
  Synthetic
SELEDILRKLEKRMTDVERYLDESNKDLERAVRRVVETLKRIDDEIRRLLEEVERDLDRK

SEQ ID NO: 14458 - protein, 56 aa, Artificial Sequence
  Synthetic
KDELETRLREITKTAEDELRKHSRTNEDIVRELKELVDEHEKELRKVVREAEDESR

SEQ ID NO: 14459 - protein, 61 aa, Artificial Sequence
  Synthetic
SELEEILKDLERMIREVEDYLRKSNERLEDVLRKVKKKLDEINDELRRVVEEVKKKLEDKG

SEQ ID NO: 14460 - protein, 56 aa, Artificial Sequence
  Synthetic
AEELKRRLEEIVKRARDLLKEHSDDNERLVERAERLVEEHRDKVRKIVEELEEEVR

SEQ ID NO: 14461 - protein, 61 aa, Artificial Sequence
  Synthetic
SEIERILEEVERAVRESDERLKDIVRKDREVVKRVKELLDKILRKDEEAIKRVIEDLERRG

SEQ ID NO: 14462 - protein, 56 aa, Artificial Sequence
  Synthetic
KDELKKEVDKWVKRARDIVKELEEHSRRSTDELRRTVEDLERHSEESVRRAEKTSE

SEQ ID NO: 14463 - protein, 61 aa, Artificial Sequence
  Synthetic
SELEKILKKIEDALKKVEEDLDRILEEDRKTLEEVKERLERDNEDLKRVVERVEEELKRRG

SEQ ID NO: 14464 - protein, 56 aa, Artificial Sequence
  Synthetic
TDELRKDVDRLVKRLKKLVDDLRRKSKETADRLRELVKRSRELSRTLAEELRKKTE

SEQ ID NO: 14465 - protein, 59 aa, Artificial Sequence
  Synthetic
SEDEEAKKRVEDLVRELKKSNDELRRKSEESLRRLKELNDELRKRVRDLEDRLRKLVED

SEQ ID NO: 14466 - protein, 55 aa, Artificial Sequence
  Synthetic
ERIIEELDKELKKSSEETDEIVKRDEDVLRRSDEESRRIIKKLEDVLRRADERVK

SEQ ID NO: 14467 - protein, 60 aa, Artificial Sequence
  Synthetic
SKDEEAKKRVEELTRKLEETVREDKKRIEDLAEKLKKVVDKLRRDSERTRKKLEEVERKG

SEQ ID NO: 14468 - protein, 55 aa, Artificial Sequence
  Synthetic
ERILRELEKVLREVKKKHKETLRTLEELLREVAKRAEDINEEDRKVLEDVVRKLT

SEQ ID NO: 14469 - protein, 61 aa, Artificial Sequence
  Synthetic
SEVEEILEDIRRRMTRVEERLRKSNKELEDAIREVTKRLKKSLDDLKKIIEEVKDVADKKG

SEQ ID NO: 14470 - protein, 56 aa, Artificial Sequence
  Synthetic
AEELRKMVEDLTKELEDLVEEDKERVKRWRDELEEIVKRDRDKVERWREEAEKIKK

SEQ ID NO: 14471 - protein, 61 aa, Artificial Sequence
  Synthetic
SELEEILRDVERLVRKVKTDLDDSLRRLKEVIDDVERLLRESNEKLRRVIKDVEDLADKKG

SEQ ID NO: 14472 - protein, 56 aa, Artificial Sequence
  Synthetic
EEALKKLVEDLRKRLREVVEEDKEKVRRWTEKAKRIVEDDKRRVEEWERKLEETVR

SEQ ID NO: 14473 - protein, 62 aa, Artificial Sequence
  Synthetic
DEVERVLDDVRRKLEKVRRDLRRIDEDLRRVVETVKRLLDESNKDLERAVRKVKDELDKKVR

SEQ ID NO: 14474 - protein, 56 aa, Artificial Sequence
  Synthetic
EEELRRVVKELKEDLERLVRELEETVREVKEELEKVVRDDEKLVEEWKKRLEERSR

SEQ ID NO: 14475 - protein, 61 aa, Artificial Sequence
  Synthetic
EEVERVLDDIRRVVEEVKRRLDEIDKKLTEENERVKEELDRIDDRLRKLVEEVKRRLDEKV

SEQ ID NO: 14476 - protein, 56 aa, Artificial Sequence
  Synthetic
REELEKVVEDIKRKLEKAVRDLEKTVKENKDRNDDIVRRVKKTVDDAEERLRRAVK

SEQ ID NO: 14477 - protein, 61 aa, Artificial Sequence
  Synthetic
KEVEDILRELRRAVEEHRRRSEELLRRMRKLVKDLEDRIREILERARRSVKEIKDRIEKDG

SEQ ID NO: 14478 - protein, 56 aa, Artificial Sequence
  Synthetic
EEVLKEVKKLLDEVRKRSKDIVDEVRKLLEEVLKEAERVLREWKKLNDEVEDRLRQ

SEQ ID NO: 14479 - protein, 61 aa, Artificial Sequence
  Synthetic
SEVEEVLKEVRKLIEDWRANSERILRRIERAIRELRRKIREWLERSKKKIKRLEEVIDKEV

SEQ ID NO: 14480 - protein, 56 aa, Artificial Sequence
  Synthetic
EDVLREARKRVDELEKRSREVAKRARDLLKEVRDKIKEVADRSRDLLRKVEEAIEK

SEQ ID NO: 14481 - protein, 60 aa, Artificial Sequence
  Synthetic
SAEEVDRRVEELLKELERRSEEVLETWKELNKKLNKDAKDVTDEVRELLKELAELIKRDG

SEQ ID NO: 14482 - protein, 59 aa, Artificial Sequence
  Synthetic
EEVVRRLLEDLRRLIDEWRKRSKEVEEEVRKSIEDIKRRIEEILRRIRKLIEEIRRRIK

SEQ ID NO: 14483 - protein, 59 aa, Artificial Sequence
  Synthetic
DEDERVKDLLRRVKKTVDELLEELKREVKKSREEAKRLLKELEDRLRRSRKEAEKLRSS

SEQ ID NO: 14484 - protein, 56 aa, Artificial Sequence
  Synthetic
REVLEEAKKILDDARRAIEEIIREWEEVNKEVDDRIDRIVEEWRKVNDKVNKDLTT

SEQ ID NO: 14485 - protein, 61 aa, Artificial Sequence
  Synthetic
SEEEKIVEDLRREVKRLAERVKELIETSKKLVEDSKRHVKDLARRLRDIIRKLKKDLRDKG

SEQ ID NO: 14486 - protein, 55 aa, Artificial Sequence
  Synthetic
RRALEELEKVVREIRRELERVHEETRRVIEESNRELEEILREAKELLEEVKKEAE

SEQ ID NO: 14487 - protein, 64 aa, Artificial Sequence
  Synthetic
RELEKALEEAKRLLDKVRKELKKIHEESRRLLKETRDETRRVLEEAERLLREIKKLIDRLREDR

SEQ ID NO: 14488 - protein, 59 aa, Artificial Sequence
  Synthetic
EEDVRRLVEELRDLIRELERKVKEVVETSRRLAEKDKEDNKRILEELRRLIRELEEDVR

SEQ ID NO: 14489 - protein, 60 aa, Artificial Sequence
  Synthetic
EEIERVEKLVEEVVRRAEDELRRSAEHVDRVVERAERLVERSREHSKDLMRRLEEVLRRG

SEQ ID NO: 14490 - protein, 59 aa, Artificial Sequence
  Synthetic
EDKAREIIERLRDVLRKIEEALERISRKLKEVLRRVEKKLEEDSRTLTRVVEEAKKKLD

SEQ ID NO: 14491 - protein, 60 aa, Artificial Sequence
  Synthetic
KEIEELDEEVRRLVEELKRLSDESRKHSKRLVEELKKLLEDSKRHSEELARRARKVLREG

SEQ ID NO: 14492 - protein, 59 aa, Artificial Sequence
  Synthetic
REDAERIIKKLEDVMKRAEETNRRDIKKLEDVLKDVEDKLREDSKRLREVLEEVKKRLE

SEQ ID NO: 14493 - protein, 59 aa, Artificial Sequence
  Synthetic
SEVEEILRDIERASEESKKTLDRILKKIEDASRRSKELSDKSLKEIRDAMEEIKKELDK

SEQ ID NO: 14494 - protein, 56 aa, Artificial Sequence
  Synthetic
SEELDRRVKELVRKSEEELKDLDREVKELVRRSEELLEDDKRLVKEVVDEARERRR

SEQ ID NO: 14495 - protein, 57 aa, Artificial Sequence
  Synthetic
DELEDVKRRVDEIVRELERLNEKLRRDVEEIVKRLKELNKRLLEEVRRTAEELKTKN

SEQ ID NO: 14496 - protein, 58 aa, Artificial Sequence
  Synthetic
EELREILKELKRVLDESRKLSKEIEEELERVLRDSERATEEILRELEKIIEEVERKVR

SEQ ID NO: 14497 - protein, 57 aa, Artificial Sequence
  Synthetic
DELEEVRKRVERIMEELKRHLEKIAKDSKKSVDELKKHLEDADRKSEESVRKLERDN

SEQ ID NO: 14498 - protein, 58 aa, Artificial Sequence
  Synthetic
RELEDILRRLEEVSERHRRSIEEILRRNEEASRRHRESIRRILEKNRRVLERVERKVE

SEQ ID NO: 14499 - protein, 60 aa, Artificial Sequence
  Synthetic
EEDERAKERVKRVVEENDKVNEDVEREVRKVVKENEDVLEEIKRTVDKIVEDLERLVREG

SEQ ID NO: 14500 - protein, 55 aa, Artificial Sequence
  Synthetic
ERILKELEDANEKSKKRSREILERLREANERIEETARRILKKLEEVLEEVERRTT

SEQ ID NO: 14501 - protein, 59 aa, Artificial Sequence
  Synthetic
KEREDVKREVEKSVEDLRRHVRDVEEKVRKIKKELEDHVRELKKRVEEIRRRLKDLADR

SEQ ID NO: 14502 - protein, 55 aa, Artificial Sequence
  Synthetic
ESVLEELKRANERHKREIERIRKELEDVSKEHEDRIRRVLEELERVLEEVKRRVD

SEQ ID NO: 14503 - protein, 60 aa, Artificial Sequence
  Synthetic
SEEERAKEEVEKHKRRLEKLVRDAERSSTEHERKLREIVERVKRELDKHEEKLRDIERKG

SEQ ID NO: 14504 - protein, 55 aa, Artificial Sequence
  Synthetic
EEVIREVEKISREVTKLLRDNLKRVEEVTERVERTLDELLERVKEVTKEVKERLR

SEQ ID NO: 14505 - protein, 60 aa, Artificial Sequence
  Synthetic
SERERAEELVRRHEDRLEKLVRELEESSDRHKKRLKRLVEEVRRLIEEHRRRLDEIKKEG

SEQ ID NO: 14506 - protein, 55 aa, Artificial Sequence
  Synthetic
EEVLRKVRTVSTEVKKRLDRNLEEVKKLTEDVTRKLRRLLEEVNKITRDVKREIK

SEQ ID NO: 14507 - protein, 57 aa, Artificial Sequence
  Synthetic
SELDEVRERLKRIVDDLRRRSEEVNKRLEEILREITERLREVNERLADIIRKIREDR

SEQ ID NO: 14508 - protein, 56 aa, Artificial Sequence
  Synthetic
EEVLKKLVEELRKRVEDMARTHDRLVEELKRKADEIVRRHEELVKDLKRKLEEVKT

SEQ ID NO: 14509 - protein, 59 aa, Artificial Sequence
  Synthetic
SEEEKAKELVKELRKEAKKIVDEMRKLVEDHAKLVEELVRDHKRLVDEHRRLIEELKDR

SEQ ID NO: 14510 - protein, 55 aa, Artificial Sequence
  Synthetic
EDVLRELEEIVRDIRKKIDDVIRKLEDISRKARKDSDDVNKRLNELTDDVRRKLT

SEQ ID NO: 14511 - protein, 59 aa, Artificial Sequence
  Synthetic
EEEERARDLVRRLEEIVRRLVKEHEDLVRRHKELVDKLVREHEKLLEDHRKLVEELKDR

SEQ ID NO: 14512 - protein, 55 aa, Artificial Sequence
  Synthetic
EEILERARKIVERLKTESDRVNKRLNEITRELEKRSDEVNTEVRRITKKVTEELK

SEQ ID NO: 14513 - protein, 59 aa, Artificial Sequence
  Synthetic
SEEERADKLVKELKKMAEDIKREMDKLVEELKRTIDELRKKHKELVDRHRRLVEELARR

SEQ ID NO: 14514 - protein, 55 aa, Artificial Sequence
  Synthetic
EEVLKTLKEIVRKIEEEIDRVEKRLRELVKELKDDSDEVNKEVNKITRKVKEELR

SEQ ID NO: 14515 - protein, 56 aa, Artificial Sequence
  Synthetic
RTEEEAERTVEDVARKVKEWREELEEVVKEVRERVKRWKEEMRKLDEDTKKKLDDA

SEQ ID NO: 14516 - protein, 55 aa, Artificial Sequence
  Synthetic
EEVIERIERILKDLHRDSERVLRELKRILDELHRESKESNERNKKLVEDAERRTK

SEQ ID NO: 14517 - protein, 56 aa, Artificial Sequence
  Synthetic
DTEKDAKRTVDDVRRKIREWEERLKKIVEEVKELVRELVERAKRLDEETEREAREA

SEQ ID NO: 14518 - protein, 55 aa, Artificial Sequence
  Synthetic
EEVIKELEDLLRRLHEESKRVLDTLRRILEELRDRVRRSNKRNEEIVKELEDRSR

SEQ ID NO: 14519 - protein, 56 aa, Artificial Sequence
  Synthetic
SEEDKAREVLKRVRDEVEKWRKELERLDEESKKKVDDLVRELEELDKKTDEELRRM

SEQ ID NO: 14520 - protein, 55 aa, Artificial Sequence
  Synthetic
EEILKKIRRILEKLHEDSRRSNETNRRILEELEKRVRESNKRNEDILREVKRKAK

SEQ ID NO: 14521 - protein, 56 aa, Artificial Sequence
  Synthetic
KTEEKVERDVERVKRDVDELIRRAEEVVKRVEDEVRKWIKELKELDDETERLVREA

SEQ ID NO: 14522 - protein, 55 aa, Artificial Sequence
  Synthetic
EEVIKRIKKILDDVRRAVKEVLDRIRRILEKVHEDSRRSNKRNKEILDKVREDTR

SEQ ID NO: 14523 - protein, 56 aa, Artificial Sequence
  Synthetic
SDEERVKEELKRILDEARRLLEESDEKLKRILDELRERLKESDERLKRILDKVRKD

SEQ ID NO: 14524 - protein, 56 aa, Artificial Sequence
  Synthetic
SEELEKEVRELKKRLKKLIDESDKNVKEAEKELRELLRRSEEHVKELKKDADRESK

SEQ ID NO: 14525 - protein, 56 aa, Artificial Sequence
  Synthetic
DDERRVKEKLKRILDESRDMLRRSDERVERSVRTLEDALRRSDEKLERILKKAEDD

SEQ ID NO: 14526 - protein, 56 aa, Artificial Sequence
  Synthetic
SKELDDAVKKNKKESKETVDRSEKNVKELHDRNEELLRRSEKNVDDAKRRLDDTSR

SEQ ID NO: 14527 - protein, 56 aa, Artificial Sequence
  Synthetic
DDEERVKKALDEILDRSRRRLEESDEKLDRSLKTLKKLLEESDRDLERILEKAERD

SEQ ID NO: 14528 - protein, 56 aa, Artificial Sequence
  Synthetic
REELEEAVRRNDEESKKTVDDSRRHVDELHRRNEKLIEESKDHVRRLEEELRKKSK

SEQ ID NO: 14529 - protein, 57 aa, Artificial Sequence
  Synthetic
DEKEELSERVERVIRTAEKLLDEIKRKLEEIHKKANEDLERSLRKLEKVVKEVRDAG

SEQ ID NO: 14530 - protein, 56 aa, Artificial Sequence
  Synthetic
EDELREDVERVKRRLEELIERLRKKVDEVKERHERMLKRSEEHVKELKDEVTEEAK

SEQ ID NO: 14531 - protein, 59 aa, Artificial Sequence
  Synthetic
SEKEELEKEVEDLERRHREELEKLNRKSKKIDEDLKRIIEELNKVSKKIKEDLEREIRK

SEQ ID NO: 14532 - protein, 55 aa, Artificial Sequence
  Synthetic
DEVRKRVEDINREVKEMLERNLRHTEEVIKKADREIEKNERHTREVIREAEERLR

SEQ ID NO: 14533 - protein, 57 aa, Artificial Sequence
  Synthetic
SEVEEVDKKLETSHRDIEKRIREVLRELEESSRKLKRDVDEVLKKLEESHRRIAESL

SEQ ID NO: 14534 - protein, 56 aa, Artificial Sequence
  Synthetic
SKRLEELVKEHKRTLEEVKRRLEELVKKHRKDLEDLVREAEELVERHKRKLDETEK

SEQ ID NO: 14535 - protein, 57 aa, Artificial Sequence
  Synthetic
SEVEEVDKEVERILDEARKALKRVEERVRKSHEDIRREIKRVEEDLERSSREIREKL

SEQ ID NO: 14536 - protein, 56 aa, Artificial Sequence
  Synthetic
AEKLKKLVEELEKEIRRLVDELDKLVRKHEEELDRLRKRMDELVKEHKKRLDDTAK

SEQ ID NO: 14537 - protein, 63 aa, Artificial Sequence
  Synthetic
DDEERAKKRVKEAEKEIKDLAKESRDIVEKHRKEVEDVVREMERIVRELAEEAKDVVRKVKDD

SEQ ID NO: 14538 - protein, 54 aa, Artificial Sequence
  Synthetic
EVKDRLRDVLKKAEEMSKEVEDRLRKSSEDLREEVERVEEELKRVLRKIEEDIR

SEQ ID NO: 14539 - protein, 63 aa, Artificial Sequence
  Synthetic
DDRERAKKTVDKVKEDLTRLVRRSEDLVRRHTEKLERVVEELERIVKELEERLKKVVDDVKDR

SEQ ID NO: 14540 - protein, 54 aa, Artificial Sequence
  Synthetic
DVKRTLREILRELEEASREVEERLKESDDRIRERVREVDEKLDRVLEELRKKMT

SEQ ID NO: 14541 - protein, 56 aa, Artificial Sequence
  Synthetic
DELEKVRKELKEILDKLKDVLEESRERTDRLLRKAEEDLRRSDEETERLVKELKDA

SEQ ID NO: 14542 - protein, 56 aa, Artificial Sequence
  Synthetic
KDELKKLVEDLDREVRKIVEELKELNKRIEDELRRIVDEARRSNEKVKELIDRLRK

SEQ ID NO: 14543 - protein, 56 aa, Artificial Sequence
  Synthetic
DEVETVEREADRILKEDEDVLRRSKKITEDILDTLREMLERSERRTEEILKRLEED

SEQ ID NO: 14544 - protein, 56 aa, Artificial Sequence
  Synthetic
KDELKKLVDELKERSKETERELKESNDRLRKKVEDIRRELKRLNDEAEEAVRRLRT

SEQ ID NO: 14545 - protein, 56 aa, Artificial Sequence
  Synthetic
SLIERIEEEIRRVIERVRRLVREIEDSDRKAKEDLERVVREDEETLRRVEKKLKDL

SEQ ID NO: 14546 - protein, 59 aa, Artificial Sequence
  Synthetic
EEEVKKLLEKVKRTARELEKVAEDMLRSNRELVKELLRTLEKSLRDSERTAEKLERAEK

SEQ ID NO: 14547 - protein, 56 aa, Artificial Sequence
  Synthetic
DKEKEISDRLKDVLRKVRDVIEKDKRTNEEARKRVEDLVRKDEETLKRVLEEVRKG

SEQ ID NO: 14548 - protein, 56 aa, Artificial Sequence
  Synthetic
LEDLLRKVEKLAREITERLKESNERSRDLVEKLKREVKKSLRKSERLMEKARETLR

SEQ ID NO: 14549 - protein, 56 aa, Artificial Sequence
  Synthetic
SEREEVKRTLTKAEEEARRLIKRDRDTNTEILKEATERSERDKDKLRKILEEVKKA

SEQ ID NO: 14550 - protein, 55 aa, Artificial Sequence
  Synthetic
KDILDRVRRLVEELRRMIEELNDKSRKLVERLRKLLEDLNRHLEELVKRLRDKAK

SEQ ID NO: 14551 - protein, 56 aa, Artificial Sequence
  Synthetic
SAKEELEDRIRDIVRRVRELITEVKKKNREILKRVEKVIKEVKETNERIEEEVRRG

SEQ ID NO: 14552 - protein, 56 aa, Artificial Sequence
  Synthetic
IDKARKEVEDLVRDAKRVIEELERSLDELVRTLDELVRRLKKSSEDLMRELRKTTE

SEQ ID NO: 14553 - protein, 56 aa, Artificial Sequence
  Synthetic
DEKKEVEKRLKEIEDEVRKMIKEVKETNRRILKKARDLIKKVEDTNKRILEEVRRG

SEQ ID NO: 14554 - protein, 56 aa, Artificial Sequence
  Synthetic
IKKLEDEVRKLKDELRRELERLKRSSTDLARRLEEIIRRLERSSEDLERRLRERER

SEQ ID NO: 14555 - protein, 56 aa, Artificial Sequence
  Synthetic
DEKEEVRKRLTDILRELEDLSRENERSNRRILDRVRELIERVKKTNKDILEEVERG

SEQ ID NO: 14556 - protein, 56 aa, Artificial Sequence
  Synthetic
IDKLRREVEELVRDLRRLIEELSRSSEELVKELEKLLRELEESSKKLAEELRKAVE

SEQ ID NO: 14557 - protein, 60 aa, Artificial Sequence
  Synthetic
SSKERIKEKVDRIEERIREVVKEVEEELRRSTEEARRMVREVKRRLEDSNRKIKKFIDEK

SEQ ID NO: 14558 - protein, 56 aa, Artificial Sequence
  Synthetic
SEELKRLLEDLRRKIEELAKELKKLLEEHKRRVDDVVRRMEELLKRHEELVRRIAK

SEQ ID NO: 14559 - protein, 58 aa, Artificial Sequence
  Synthetic
SEAEEAKKTVEEISERLREALRRSEEETERILRENEKASERHKTEIEKITKELEDKLG

SEQ ID NO: 14560 - protein, 56 aa, Artificial Sequence
  Synthetic
KDELKKVLKEIEDTVRRIVKELEDLNTEAEKASRKSVKELEEHLKRVEERVREEAK

SEQ ID NO: 14561 - protein, 59 aa, Artificial Sequence
  Synthetic
ELKERLEKLLKDWADDSKRMRDELARLLKEWEDRSRKAKRDLEKILEENDDKVKKLDKV

SEQ ID NO: 14562 - protein, 59 aa, Artificial Sequence
  Synthetic
EKVLREVKESAKKISRHSEKVLDEARKELERISEHSRRVLDRVRRESKKIVEDLRERKR

SEQ ID NO: 14563 - protein, 60 aa, Artificial Sequence
  Synthetic
DIERELEEIVRRIKELIRRHKKRLEELVRELEELLRRHREELKKLVKRAAELVEELRRRN

SEQ ID NO: 14564 - protein, 55 aa, Artificial Sequence
  Synthetic
DTVKDMLRKLLEEVKEASDRAREKLTDILRKIKKISEEVKREIDDIRKKIEDTAK

SEQ ID NO: 14565 - protein, 60 aa, Artificial Sequence
  Synthetic
SIEEEAARIVEELRREVEEWERTLREIVERLRRLVEEHKRRLDELVAELKRLVDELRKEN

SEQ ID NO: 14566 - protein, 54 aa, Artificial Sequence
  Synthetic
DIRRKLKEILDELDTITEKLKKELERIKREMKEASRRVREKIDRIRKEIEEVAR

SEQ ID NO: 14567 - protein, 56 aa, Artificial Sequence
  Synthetic
DEIRELLKRIRDVAKRIKDKADRLNEKSRRKVEKLVRDVEKINEDTKRLLDRLRDS

SEQ ID NO: 14568 - protein, 59 aa, Artificial Sequence
  Synthetic
EDVLRELERLLKEIEDLVRELNKTNKKIVDKARKDVKDVHRTNERLLREIERVVREKLK

SEQ ID NO: 14569 - protein, 56 aa, Artificial Sequence
  Synthetic
SEAEELLRRLEKIIEDLERNARALLEKLKEEIRRLDKNLRDLLRRIEKIMRDLTRS

SEQ ID NO: 14570 - protein, 59 aa, Artificial Sequence
  Synthetic
EEVLKEIKRVLEEAEKVSEDLLREIKEVLDRAEELSRRLLKTLEDLLRDIERSVKERED

SEQ ID NO: 14571 - protein, 57 aa, Artificial Sequence
  Synthetic
SSKEKVEELVKEIEEEDRRVLEDTRRLLEEIMRRDEDVLRKTDERIKEIEKELRDRV

SEQ ID NO: 14572 - protein, 56 aa, Artificial Sequence
  Synthetic
SKEAEDRLRDLVRRSREIAKRSRDHLRDLLRESEERVRASLEHVERLVKKLRKDAN

SEQ ID NO: 14573 - protein, 56 aa, Artificial Sequence
  Synthetic
SEAEDLLRRLEEEIRRIKKRHKEVLDELRKLIKEVEDRHKELLDRLREEIRELEER

SEQ ID NO: 14574 - protein, 59 aa, Artificial Sequence
  Synthetic
DRVKEELRRIVKEVRDEIRKANEKIKRLLDEVRERSKDMNRRLKEIVDRVTESLRRKAE

SEQ ID NO: 14575 - protein, 61 aa, Artificial Sequence
  Synthetic
SEVDEALERIKRLIEDLERHVREWLKELREIIEDLRERVRKLLEDLERRIKELEEKARRTG

SEQ ID NO: 14576 - protein, 59 aa, Artificial Sequence
  Synthetic
SKAVEDLERLVEELRKLSEEASRRSRKILEELRETVERVIKRLKELLKKLKEVVDELRR

SEQ ID NO: 14577 - protein, 61 aa, Artificial Sequence
  Synthetic
DRAEKVLEDIRKLIEEMRKHAEEWERRAREAVKELRKEVTDWRRRLRKLLEDLEEKVRREG

SEQ ID NO: 14578 - protein, 59 aa, Artificial Sequence
  Synthetic
SEVVRRLEKLVEDLRKINEDVNRRSRELVETLRDDVRKVNEESKRILEEVKKILDDSKR

SEQ ID NO: 14579 - protein, 59 aa, Artificial Sequence
  Synthetic
DLRRELRRVLEESKKHVKELVRELDEDLTRWERRVEELVKRLRDVLRKLEKEVDELEKK

SEQ ID NO: 14580 - protein, 58 aa, Artificial Sequence
  Synthetic
RVKEELRELVRESDKIAEEIIEKLDRDVKKVKKDHERIDEELKRKLKEVEERVERIRT

SEQ ID NO: 14581 - protein, 61 aa, Artificial Sequence
  Synthetic
SEVEETLREIKEDIKRSKKEWDDLLKTIKELIEDSKRKWDKLLRDVEELIRELLERLRRDG

SEQ ID NO: 14582 - protein, 59 aa, Artificial Sequence
  Synthetic
DRAERDVERIIREAKKLTDKVREDVERLREEWERLVREVKERIKRLLEDLRRLVEETRR

SEQ ID NO: 14583 - protein, 61 aa, Artificial Sequence
  Synthetic
DEAERLLEEAERIIEKSREEWERLLERIKRLIETLRKRYEDDLRESEKRIEELLRKARRDG

SEQ ID NO: 14584 - protein, 59 aa, Artificial Sequence
  Synthetic
DRVAREVERILRELKKLTDDMKKRAKELIDELKRLSEEMHRRIEKSNEDLKRLVDDVDR

SEQ ID NO: 14585 - protein, 61 aa, Artificial Sequence
  Synthetic
DEAEDILRRIRELIERSKRKWDELLREIKKLIEESRREWEELLRRIREIIERLKRLAERDV

SEQ ID NO: 14586 - protein, 59 aa, Artificial Sequence
  Synthetic
ERVKEEMKRLIEDLKRVSEEVKRELDKLIEELKEVSERASKRLKELIDDLDRLVKEVEK

SEQ ID NO: 14587 - protein, 59 aa, Artificial Sequence
  Synthetic
SEDEKAIEELKKEIERLRRLLEELRKHVRRLIEEIKRLVEESKRHVEELIREIDDLRRR

SEQ ID NO: 14588 - protein, 55 aa, Artificial Sequence
  Synthetic
KEVTDIIRELKEVLDEIKRTSEELLRTIEEIVRDAERKNRELLKELKKVLDEVEK

SEQ ID NO: 14589 - protein, 58 aa, Artificial Sequence
  Synthetic
DEDEELIKRLRDRIREIRKLVEDSARNVKRLIDEDERLARRSLRHLEETLKEIERKAR

SEQ ID NO: 14590 - protein, 55 aa, Artificial Sequence
  Synthetic
DEVREVLKEIRELVKELKERNDELLTRWKESIKRVEEEDERILREIERRVEEVER

SEQ ID NO: 14591 - protein, 60 aa, Artificial Sequence
  Synthetic
RAEEEVKRLLKEDNETLKRIEDDVRRLLRKNNESIREAEKTNRELVKRVEDIIRRARERG

SEQ ID NO: 14592 - protein, 56 aa, Artificial Sequence
  Synthetic
LEELLERIKELNERTKKKVADLRRVAKRLDEETERKVRETERRWRDVLDKVRKKVK

SEQ ID NO: 14593 - protein, 55 aa, Artificial Sequence
  Synthetic
REVEEVLERLKELLREHEKHAKEVEDRLRELIRENKEHAREMLERLEKILDELKK

SEQ ID NO: 14594 - protein, 59 aa, Artificial Sequence
  Synthetic
EEALRELRRLLDEIRRVNRKVEERIKEVLKKIDEDNKEVVRRLEEALEKIREVIERTAT

SEQ ID NO: 14595 - protein, 59 aa, Artificial Sequence
  Synthetic
KAKEDVKRALDEWKEVNDRVNEELKKAIDTWREVNRKVKEDVDRLVKEIEELIRRVREN

SEQ ID NO: 14596 - protein, 56 aa, Artificial Sequence
  Synthetic
REDVKRELKRVIEETRERAKRLLEDLRRLIEETKKLAEELLARAKEIIDRIREAAR

SEQ ID NO: 14597 - protein, 61 aa, Artificial Sequence
  Synthetic
RAEEELDRLSREVEKVSKKAREDLEEMRKALEDVSRRVKEKLRRILEEIKEAIKDVKRRTN

SEQ ID NO: 14598 - protein, 56 aa, Artificial Sequence
  Synthetic
RELIREVEKLIEDHRRRLEEIVETVRRLVDEHRRRLERIVREAAKLVKDIKRELEK

SEQ ID NO: 14599 - protein, 61 aa, Artificial Sequence
  Synthetic
SVKEKLRRISKELEKASRDDERENRRILKEARDVIREAADKIRRIEEELRKIIDRVRKETN

SEQ ID NO: 14600 - protein, 56 aa, Artificial Sequence
  Synthetic
EEIIEEVKRLVDEHKKRLDENVKRLKELVDRLRETLERLVDRLRKLVETLKRESDR

SEQ ID NO: 14601 - protein, 61 aa, Artificial Sequence
  Synthetic
KVEEDLKRIKKEIKDAADEDREKNREIMKRLNDVTREVEERLRKILEDLERLVRRVKEEVN

SEQ ID NO: 14602 - protein, 56 aa, Artificial Sequence
  Synthetic
EELIKRVKELVREAKERLKDNVRRLEELVKEWKRKLKEIVDRVRELVKDLERRLKE

SEQ ID NO: 14603 - protein, 61 aa, Artificial Sequence
  Synthetic
SEKEKIVKDVEELIREAEELVRRLLKRLKELNDESEKTARDLVRKNEETLKELKDVVDRRV

SEQ ID NO: 14604 - protein, 55 aa, Artificial Sequence
  Synthetic
RELDELIKKLDEVLRRAEKEAEELIRDHRRISREVKERIKDLNRRIERILREAEK

SEQ ID NO: 14605 - protein, 61 aa, Artificial Sequence
  Synthetic
SLEEIVKRVEEDIRRIIEELRRRIEEADRKIAEIIDRLRKTVEKVNKEIEDLIRELKKKEG

SEQ ID NO: 14606 - protein, 56 aa, Artificial Sequence
  Synthetic
DKRVRELVEEVKKKLRDLVEEVRESVKRLEDTLRRVEEEIRTTARELLRRLREELE

SEQ ID NO: 14607 - protein, 59 aa, Artificial Sequence
  Synthetic
SLEEEVRETVKRLRKEVEDWLREVEKVLEDLLRELKKSIEETKKVAKELEDKLRDVKRR

SEQ ID NO: 14608 - protein, 59 aa, Artificial Sequence
  Synthetic
ERIRRTLEKAREEVKRLSAETKRLIEEVKRRLDELLKRDNDIIDDARRRVKKVLDEIET

SEQ ID NO: 14609 - protein, 59 aa, Artificial Sequence
  Synthetic
DLEEELRKVVEDLERKLRESIRETEEVMRRLEESVEESIRKTEEVVKRLREKLEDVKRR

SEQ ID NO: 14610 - protein, 59 aa, Artificial Sequence
  Synthetic
DEIRDTVRKAKEDVERLLEEDNRRIKEVLDRVAKLNKRDNETIERAEEEARKVLREIEK

SEQ ID NO: 14611 - protein, 59 aa, Artificial Sequence
  Synthetic
DIEEEIREEVERLRRTLKELADRIKKLVDELREKLRRWLEEVEEVLRRLIEDLRRVKEE

SEQ ID NO: 14612 - protein, 59 aa, Artificial Sequence
  Synthetic
EELEKRVREAEEEVRRVNKKLKDDLDKAREDLKEFSDRTRRMIKAVERDVKRVLDEIRR

SEQ ID NO: 14613 - protein, 58 aa, Artificial Sequence
  Synthetic
SVEETIKRILEEVEELIREVKERNERIERRAERLIEEVKRSNDEIKKEVRTAIEKVIR

SEQ ID NO: 14614 - protein, 56 aa, Artificial Sequence
  Synthetic
KEKVDKLVKDLRRVIEELRKSLEDLERRLDDILRRLKESSDELVRELRRLLKEMEK

SEQ ID NO: 14615 - protein, 60 aa, Artificial Sequence
  Synthetic
SVEEALDEIEKKVEEMIREVKETNDRVRRKVKELSEKSKTENERVVREARELIREVERER

SEQ ID NO: 14616 - protein, 56 aa, Artificial Sequence
  Synthetic
KKDVDDLDRDLEKKLRDLKDSSRKLVKRVEDLVRESEDTVRKLIERLERLIRETKR

SEQ ID NO: 14617 - protein, 58 aa, Artificial Sequence
  Synthetic
KVEEELDKILKEVEDLVRRDEEEIKRILEEVKELIRKVKETNDKVEREMRKLVEEVKK

SEQ ID NO: 14618 - protein, 56 aa, Artificial Sequence
  Synthetic
EDSVRELVKRLRERAEESKKRTKDLEDKIRTKIEELERSSKELTDELRTLIREAER

SEQ ID NO: 14619 - protein, 59 aa, Artificial Sequence
  Synthetic
SVEEAIKEILRELEKVNEDSKRLSDRNLKELEKALRDAKKSVEEILRELEKALDEVRKN

SEQ ID NO: 14620 - protein, 60 aa, Artificial Sequence
  Synthetic
REDVERILKEIKDEVDRVRKENERVNRESEDESRKLVEELKKVLRRLKEEVRRIVEELRT

SEQ ID NO: 14621 - protein, 61 aa, Artificial Sequence
  Synthetic
EVEERLEEILRRLERAVEDWKRKNEKILKELRDVVRESKKRTREIEKKIEDAARDVLREVN

SEQ ID NO: 14622 - protein, 56 aa, Artificial Sequence
  Synthetic
KEVVKELEKDVRRIVEELKDSLRRLKEKVEEVARTVKKLNEELDDSVREIVERLRK

SEQ ID NO: 14623 - protein, 61 aa, Artificial Sequence
  Synthetic
NVEEELDRIRREAEKVVKESRELTREILERAREAVEKSEEDTRRILERLERVVKRVKKDVN

SEQ ID NO: 14624 - protein, 56 aa, Artificial Sequence
  Synthetic
EEVLDELRKKVKKLVDELRTEDRRLEEEVKKIVRDAEKRNKELEDEIRRLAEELEK

SEQ ID NO: 14625 - protein, 60 aa, Artificial Sequence
  Synthetic
SETETAVKKLKKLVDDLKREVERLVERLRELVRENSEKSRELVKRSDDLVRELLEKVKRR

SEQ ID NO: 14626 - protein, 56 aa, Artificial Sequence
  Synthetic
SELVKTVEEELKKVLEEVDRLVRKILEDLRRSLEESKRLSEESKKKLEDVLDRARR

SEQ ID NO: 14627 - protein, 60 aa, Artificial Sequence
  Synthetic
RELEEAVKKLKKKVEDNTRTSRKLVTDLEREVEELKKEVEEVVRKSKELVRELKKKVDRR

SEQ ID NO: 14628 - protein, 56 aa, Artificial Sequence
  Synthetic
SELVERVKEELKRSLEESDKLVEDVRRKLKEVLDDIRRLSEESKRELRDVLREADK

SEQ ID NO: 14629 - protein, 60 aa, Artificial Sequence
  Synthetic
ELEEIVKDARRRIKELIDEARRTSEEVVERIKELLKRAEEISREARKRLTELLEELKKTV

SEQ ID NO: 14630 - protein, 56 aa, Artificial Sequence
  Synthetic
KEELRKIVEDILRTIKKLLEELRDDARRLLEEIKRLLEELERHVRKLLKEIDERIK

SEQ ID NO: 14631 - protein, 60 aa, Artificial Sequence
  Synthetic
ELEEIARKAKEDIERLVEEARRISEEVKRELTELVERLRRISEEVRKRIEDLADELRKKV

SEQ ID NO: 14632 - protein, 56 aa, Artificial Sequence
  Synthetic
KKTLKEKVEDILRRIRELLRELRENARELVKEIERLIRELEKDAKRILKKIEDAIR

SEQ ID NO: 14633 - protein, 60 aa, Artificial Sequence
  Synthetic
SVEELVKEIEKRLDELVREIEKTNKKVEDDIRKMLEDIKRVHDKSNEDLEKLVKELREKL

SEQ ID NO: 14634 - protein, 56 aa, Artificial Sequence
  Synthetic
LKDIEKVARDILRRVKKILEENRKHAEKARRELEKLLRESKRLVDELLRRAEEEKR

SEQ ID NO: 14635 - protein, 60 aa, Artificial Sequence
  Synthetic
SREDRARELVKRILDEHKKILEDVEELAKELLRRHEELLKTLRELMRRIEEDLKRLEDED

SEQ ID NO: 14636 - protein, 56 aa, Artificial Sequence
  Synthetic
SEILKTVTRLSEELNRRIREVVRKVEEDLEDLNRRLKKIADEIEERIKEILRRIEK

SEQ ID NO: 14637 - protein, 60 aa, Artificial Sequence
  Synthetic
SIEDVVRRIREEDRRLHEEIRKVVDEIRKRLEDALRSHEERVREVLERIKKLLEELKRRG

SEQ ID NO: 14638 - protein, 56 aa, Artificial Sequence
  Synthetic
EKDLRKKLREIEEKNERLLRELERLLEEIRRTLEDLNRKLDEEIKKLERRLKERDR

SEQ ID NO: 14639 - protein, 58 aa, Artificial Sequence
  Synthetic
SLKELIDEVERRLREVNRRARELVEEVKERLRRVNEESRELLREIEERLEDVLRELEE

SEQ ID NO: 14640 - protein, 59 aa, Artificial Sequence
  Synthetic
EEEIKELVKRARELVKRSKEHVDELMETAKRLVDESRKHAEELFRELKKLIEELREKIR

SEQ ID NO: 14641 - protein, 60 aa, Artificial Sequence
  Synthetic
SEVEKLVEDLRREVKRHSEKVERLVKELRDDLERWKERLEEIMRRLEKLVRDLEELLRRG

SEQ ID NO: 14642 - protein, 56 aa, Artificial Sequence
  Synthetic
EELVREVKERLERSRERVDKLLRDNHKRLKEVLDEAKKLIDRVRKLLRRVLEEAKK

SEQ ID NO: 14643 - protein, 60 aa, Artificial Sequence
  Synthetic
SDVERLITELADSVRDHSRDVRRVVEELEKLLRDWERDIEDIVEKLDRLVRTLEELLRRG

SEQ ID NO: 14644 - protein, 56 aa, Artificial Sequence
  Synthetic
EDLVRTVEKLNTESLDEVRKLVKKNHEDLKRVLDKAKKLIEEVRKKLEEVLDEARK

SEQ ID NO: 14645 - protein, 59 aa, Artificial Sequence
  Synthetic
TLEEILKEVAERVKKANEDSRRILEKVKRDVETVNRENEKILKKAAEDVKRVLDEARKR

SEQ ID NO: 14646 - protein, 56 aa, Artificial Sequence
  Synthetic
EKELREMIEKLKRDNERMLRELERRIEELKRDNDRVNEESKRLVDELKRDAEEKLK

SEQ ID NO: 14647 - protein, 59 aa, Artificial Sequence
  Synthetic
TLEEILREVEKRVKEANERNRKISEELADLVRRVNEENKKILEDVAEEVRRALERARRR

SEQ ID NO: 14648 - protein, 56 aa, Artificial Sequence
  Synthetic
EEELRRMIEELEKRNRDVDRESKKLAEELEKTNRDVNRKSRELVRRLRRKLEEELR

SEQ ID NO: 14649 - protein, 59 aa, Artificial Sequence
  Synthetic
ELEDILREVRKRVEDVNRRNKEILERVAEEVRRLNEENKRILEEARKRVEKVLEDLKRR

SEQ ID NO: 14650 - protein, 56 aa, Artificial Sequence
  Synthetic
EEELRRAIKELKDRNEDVDRRTKELIKRLEDKNRELNRESRERVEELKKRAEELAR

SEQ ID NO: 14651 - protein, 59 aa, Artificial Sequence
  Synthetic
DLEEILKDVKRRVEEANRRNEKILEEAKEKVDRVNRSNEKILEEVKETVKEVLRRAREE

SEQ ID NO: 14652 - protein, 56 aa, Artificial Sequence
  Synthetic
EEELKEMIRRLEETNRRVDKETRKLIEELERRNREVDRESERLIRELKKKAKDDLD

SEQ ID NO: 14653 - protein, 59 aa, Artificial Sequence
  Synthetic
TLEDILREIAKVVKEANKRNKRILEKVARDVEEVNKENKKILDEVKRDVERVLREAEKR

SEQ ID NO: 14654 - protein, 56 aa, Artificial Sequence
  Synthetic
EDELRRMLEELERTLREVDRESDELVKKLKRDAERVNEETRRLIKELKEIADRLLD

SEQ ID NO: 14655 - protein, 60 aa, Artificial Sequence
  Synthetic
SIEELVREIEKTNEDMRREIERLSDENRRRLDKALEDIERRAREIKEKLERVMKRLREKG

SEQ ID NO: 14656 - protein, 60 aa, Artificial Sequence
  Synthetic
EKRVLDELRKLLEDSKDELRRLLEELRRHIKETDDTVRELLDRIRKIREELDDEVRRLEK

SEQ ID NO: 14657 - protein, 60 aa, Artificial Sequence
  Synthetic
KEEEDARRALKRVEEEVRRNKEEMRKLLEDNEKRIRENKKRAEDSSRKVKKRIDELRRDG

SEQ ID NO: 14658 - protein, 55 aa, Artificial Sequence
  Synthetic
EEVLREIEKILRDLERDHRRVLEEIRKRNDELRETHERVLRENEKILEKVERELR

SEQ ID NO: 14659 - protein, 56 aa, Artificial Sequence
  Synthetic
SVDDKVRRRIREIKEELERVLTRSERESDDIKRELEEVLKRSEERTKKIKDDAERG

SEQ ID NO: 14660 - protein, 60 aa, Artificial Sequence
  Synthetic
DERVMRDLERELEKLERKVREIKRELEEHNARLREKVRRIDEDLKRDNKELEDTIREDTR

SEQ ID NO: 14661 - protein, 59 aa, Artificial Sequence
  Synthetic
KEEEELEERIRRLEKLVEDYKRELDRSIKELEDEVDRARRELEKSIEEMKKKVKKAEDD

SEQ ID NO: 14662 - protein, 59 aa, Artificial Sequence
  Synthetic
DRVIRKIKKLLDEVRERLERINRTHRELLKEVEERLKKILKDITDANRRIEERLEEITR

SEQ ID NO: 14663 - protein, 60 aa, Artificial Sequence
  Synthetic
SLKEELKRINDENKEELDRLREELKKLLKEVEEELRRAAEELERINRRIKEELDKVADRV

SEQ ID NO: 14664 - protein, 59 aa, Artificial Sequence
  Synthetic
EEVAERLLEELREDVKRTKEKMKEMLDRVKKKIDDIKRKLEKLLRDNERRIEELKRDAD

SEQ ID NO: 14665 - protein, 58 aa, Artificial Sequence
  Synthetic
SVEEKLKKALEESKRKSKRIKDDDERANREVKKRIEDIVRRLEEVLRKVLKDVTKDIK

SEQ ID NO: 14666 - protein, 56 aa, Artificial Sequence
  Synthetic
EDEVTRDVKRLEDHNTRLEKKVKESVERLKEKLEELRKRVEKIERDLEKLLEDVRT

SEQ ID NO: 14667 - protein, 60 aa, Artificial Sequence
  Synthetic
KAEDVLRRVKEEHERIRREIKRVIDDVRRKHKEILDRLREEIKRVEELLRKILEDVERDG

SEQ ID NO: 14668 - protein, 56 aa, Artificial Sequence
  Synthetic
EEVVKELEDNVKRNEEDAKRTVEKLRKNLEDNRREVEKIVRDLRRLVEKAREDVKR

SEQ ID NO: 14669 - protein, 56 aa, Artificial Sequence
  Synthetic
DLKEILDEARKLIEDLRKKAEEILEESKRLLDDLKRKADEILTRYDELTKRLSTKV

SEQ ID NO: 14670 - protein, 56 aa, Artificial Sequence
  Synthetic
LEELKKRLEELIREVEKDLRRIKKESEDRVEEIERRLRRIAEELDKDVRRVEEEAK

SEQ ID NO: 14671 - protein, 63 aa, Artificial Sequence
  Synthetic
SKEETVARRVDEIARELEEKNKKWEDDSRKAVDELRRKLEEWEKRSRDLREKVKDLLRKLKDQ

SEQ ID NO: 14672 - protein, 55 aa, Artificial Sequence
  Synthetic
EELKKKVEKLLEDHRKKSEELLRKDEKLIRDMEREVERLLREDEKVIEDVERATK

SEQ ID NO: 14673 - protein, 63 aa, Artificial Sequence
  Synthetic
SKEETVERDVERIVRRLRELNKEWKKRSEEVKREVDESDKRTAEAVKKLVRDLEETLKDLKDR

SEQ ID NO: 14674 - protein, 55 aa, Artificial Sequence
  Synthetic
EEIKKKLEKLLKEHEDLSRKLLKEDEEEIDRHRRKVREWAEDLRKKLEEAERAST

SEQ ID NO: 14675 - protein, 60 aa, Artificial Sequence
  Synthetic
SEKERAEEELKRIEDELREAIKRSEDRLRRIEKELRDREKRSEEELRRLEEELRRLAEER

SEQ ID NO: 14676 - protein, 55 aa, Artificial Sequence
  Synthetic
RKIIEDLKRLLREFERAVEESNERLRRLLEEFKEKVKESNKRSRELLRRMEEEVR

SEQ ID NO: 14677 - protein, 57 aa, Artificial Sequence
  Synthetic
DDLERLEKEAREILERHKRALDELEKRLRRVLEKHEEDLRRLEETLRELLKKVRKDG

SEQ ID NO: 14678 - protein, 56 aa, Artificial Sequence
  Synthetic
REELEKEVRKLEKKSRDDIRRLEKELRELEKRSRDNIRELEKRVRRVARELDKTAK

SEQ ID NO: 14679 - protein, 59 aa, Artificial Sequence
  Synthetic
DEKEEAEKALREIKKRIEDNVREVRRLNRELREKLRKLIEDYDRLLKELEKRVEDIVRK

SEQ ID NO: 14680 - protein, 56 aa, Artificial Sequence
  Synthetic
ERDLRREEKKLRDELRDLHREHRKSIEDLDREIKKMEDELRRSIEENRKRVEELEK

SEQ ID NO: 14681 - protein, 56 aa, Artificial Sequence
  Synthetic
REKERVKRVVRRVEEELKRNLEEVEEESRRDLRRLEENLERVEEAVRRILKRLDDS

SEQ ID NO: 14682 - protein, 56 aa, Artificial Sequence
  Synthetic
REELEKLIEKIERELKKTHDDSRREIERLRRETKKLHEKSEELIRELEKRLRDAER

SEQ ID NO: 14683 - protein, 60 aa, Artificial Sequence
  Synthetic
SEVEEILDRIRRELERLAREARKTVERNKKELDRIREEVDRSLRRNKEELDRLRREKKDV

SEQ ID NO: 14684 - protein, 59 aa, Artificial Sequence
  Synthetic
EDARRAARELLKRLEDLLREHHDRLRKSDEEIRKLIEDHHRALEESNREIKELIDRMAK

SEQ ID NO: 14685 - protein, 60 aa, Artificial Sequence
  Synthetic
DEAEKLIKDIEDKDEELKEKARELKEKLEERDERTKKLIEELKREADRTLEELKKKVEKA

SEQ ID NO: 14686 - protein, 58 aa, Artificial Sequence
  Synthetic
EVVKRVRDLLKRHEDLTREIKKEVKKMNEKNRELVRRVEETLKKLLEDLKRLLDESRK

SEQ ID NO: 14687 - protein, 60 aa, Artificial Sequence
  Synthetic
SEEEEKVKDIERKLRKHNKEVKDTERENEKRLRELRRTVEEDRKDAERELERIKRVVERG

SEQ ID NO: 14688 - protein, 55 aa, Artificial Sequence
  Synthetic
EELDRLEKELRESIRRAEELLKDSKRRADELIERIKDVLRKVKEKIEKLIEDTRR

SEQ ID NO: 14689 - protein, 57 aa, Artificial Sequence
  Synthetic
SEKEVVEELKKTVDDLKRKSEEAIKKAKEAVDKIRRDSERAIRKNEDTLRKIEEEIK

SEQ ID NO: 14690 - protein, 56 aa, Artificial Sequence
  Synthetic
EDILREIAKRIKDLIEDHKRASKEIERDIRKILEDHKRAAEKIRRDLRRLLEDVER

SEQ ID NO: 14691 - protein, 60 aa, Artificial Sequence
  Synthetic
SLEKMVTDIIRKLEEIARRHKTRSDEIVRRLEEIIKTHEKRSKELMDDLKRLVDEVRKKK

SEQ ID NO: 14692 - protein, 56 aa, Artificial Sequence
  Synthetic
EEDIRRLDEEVKDLERRSREEEERLEREVRELEKRSEETIRRVEKKVRDLADELRK

SEQ ID NO: 14693 - protein, 59 aa, Artificial Sequence
  Synthetic
SEEDVVKKVRKKLEDVHRDTRREIRRLEEETKKLHDETRKTIETIERRLRDLRDRLTKE

SEQ ID NO: 14694 - protein, 56 aa, Artificial Sequence
  Synthetic
SEEVRDVKEKLKRNLEEARKASREDLERLKRNLEKADEDVRRLLEELKRLLDEVRR

SEQ ID NO: 14695 - protein, 60 aa, Artificial Sequence
  Synthetic
SLEEAIEDLRRKLEKLLKDYADLSKEIEDKLRKIHEDSRRLVEKLEEEARRILKEVRERG

SEQ ID NO: 14696 - protein, 60 aa, Artificial Sequence
  Synthetic
EEEVRKEIEDADKRVKDLKRELERDIDELRKRVEELRRRHEEKIKKVAEDVKRREDEARK

SEQ ID NO: 14697 - protein, 61 aa, Artificial Sequence
  Synthetic
SRLEKIKRELDKKLKDHEDDSRDKVRKLRESLKRHEDKSRKEEEEVKKTLKELEDKLRRDG

SEQ ID NO: 14698 - protein, 56 aa, Artificial Sequence
  Synthetic
KRLVDDAKRKIKELEEENERLVKEVEDRNRELDERNKRIIDRIRRLNERVKEEAEK

SEQ ID NO: 14699 - protein, 57 aa, Artificial Sequence
  Synthetic
DEVETVIERDKKLLEDWVDRARKVVKRDEDSLRRDEEENRRVVEENSRTVKELKERI

SEQ ID NO: 14700 - protein, 58 aa, Artificial Sequence
  Synthetic
EVVKRVEEEVKRLNERADELLKRVEKRAEELNEESRRLSEEVERKVRELNREADERVK

SEQ ID NO: 14701 - protein, 57 aa, Artificial Sequence
  Synthetic
SEVEEVVKRNSDTAKEDMDRNEKVVEDNSKRLREWEKAIEEVEKEVDKAMKDLKRRI

SEQ ID NO: 14702 - protein, 58 aa, Artificial Sequence
  Synthetic
KLVEDVRREVEKLNRESEERSKRVKEEVDDLNRKLEKLLRDVKEEVKKLLEEAERETK

SEQ ID NO: 14703 - protein, 57 aa, Artificial Sequence
  Synthetic
DEVRKVVEDNERSVREIKEELKRVVEEDKELVDRWRERLEKVVKDNERSAKKIKDDV

SEQ ID NO: 14704 - protein, 59 aa, Artificial Sequence
  Synthetic
DEMLRRIEETIRRLDEELRRLVEEVKRRIDELNREVEKRIREVEERIKEMDKRLREAVK

SEQ ID NO: 14705 - protein, 57 aa, Artificial Sequence
  Synthetic
DEAEKVVEKDRRLIEKWKEDLKELVRRVREKVKEIKKRVADVVKENEDSVRRIEKEV

SEQ ID NO: 14706 - protein, 59 aa, Artificial Sequence
  Synthetic
DEMLRRIDRRAERLNEDVARVIDEVAKRVTRLLERLEEKLKKIRDDIKKLDEELEEAAR

SEQ ID NO: 14707 - protein, 57 aa, Artificial Sequence
  Synthetic
DEVRELVKENRRSVKENEEELKRILDEDERLIRDWKKKLEEVVRKVAELVREIEERV

SEQ ID NO: 14708 - protein, 59 aa, Artificial Sequence
  Synthetic
DELLRRVAETVKRMDEDLNRTTEEIADTIRRLNEEVAKRIREVERTVERLIEELEEAVR

SEQ ID NO: 14709 - protein, 55 aa, Artificial Sequence
  Synthetic
DEEEELEKDARRVLEELRRELERVVREAKDINRRVEELIREVRERAKRVDDELRK

SEQ ID NO: 14710 - protein, 55 aa, Artificial Sequence
  Synthetic
ERVLREVERVLRELEREADEVLKEDRELLERWKKTVKDVVKENRDSLDELAKEMK

SEQ ID NO: 14711 - protein, 55 aa, Artificial Sequence
  Synthetic
SEEERLREEAKEVLKRLREDLKRVEEDVERVDKRLRELNEDVARKLEEVLKRLRE

SEQ ID NO: 14712 - protein, 55 aa, Artificial Sequence
  Synthetic
EKVLREVKRALDDLRRRVEEVLRKNEKSLRELEEENRRVLKKVEDLLEDIIRRLK

SEQ ID NO: 14713 - protein, 60 aa, Artificial Sequence
  Synthetic
REEDEVRKELERVERRIEDLLREVERTNREVIETSERLTKTVEDDVRRVNTEIDRLLKEK

SEQ ID NO: 14714 - protein, 55 aa, Artificial Sequence
  Synthetic
EELLRELEEVLRRIEEKLKKIDDESKKLAKEDTDRNKRIVDENTRLVEEWDKRAK

SEQ ID NO: 14715 - protein, 60 aa, Artificial Sequence
  Synthetic
SVLEEVRKKVERVIRESRELSERVREHIKRTIDEVKKLTEEVRKIVETLIRRLKELLDRV

SEQ ID NO: 14716 - protein, 59 aa, Artificial Sequence
  Synthetic
DEEVRKILTDLRKAVDEDRRRNEKLLKDSEDAVRRDEKENRDILRELRKAIEEIERRLR

SEQ ID NO: 14717 - protein, 60 aa, Artificial Sequence
  Synthetic
SMVDKVREEARKLIEEARRLSEEVKKIIDELTKRVKDLTRTSHELSKRLEDTIRELLKRV

SEQ ID NO: 14718 - protein, 59 aa, Artificial Sequence
  Synthetic
DEKLREILKRLREELKRDEDRNRELLKRVRDRVKKDEEENRENTKRVREAVEKIERELE

SEQ ID NO: 14719 - protein, 60 aa, Artificial Sequence
  Synthetic
DVLEEVRRRAEEVIREARELSKRSHDRSRELIERVKKLTEESHRLSRKLIRELEERLEKV

SEQ ID NO: 14720 - protein, 59 aa, Artificial Sequence
  Synthetic
DEEVRRILKELRDEVKRDEERNRKNTKDVKDEVDKDRRTNEKNTEDAEREIRRIKEDAR

SEQ ID NO: 14721 - protein, 60 aa, Artificial Sequence
  Synthetic
SVLEDVRRDVERLRREIEELSKRSHERSRRIIERLEELLKRSHDLSKRLRERLEELLKRV

SEQ ID NO: 14722 - protein, 59 aa, Artificial Sequence
  Synthetic
DEEVRRILKKLRDDVKKDEDDNRRNTEEVRKLAKDIERKLKKNTDDVRKDIKAIEDRLR

SEQ ID NO: 14723 - protein, 60 aa, Artificial Sequence
  Synthetic
SVLEKVKELLDRLIRELEELVKTVEEIARRLITEVRELTERSHELSRRLIKELKRLLDDV

SEQ ID NO: 14724 - protein, 59 aa, Artificial Sequence
  Synthetic
DEEVRRILEEITRVLEEIATRLKRILDELRKAVDKDRKDNERNTEEVRKLIEEIKRRLK

SEQ ID NO: 14725 - protein, 59 aa, Artificial Sequence
  Synthetic
SLLDEVRRKVKEVEDRLRKLVKDSHELSRRLIEEVERLTKTSHELSRRLIEELRELLKR

SEQ ID NO: 14726 - protein, 59 aa, Artificial Sequence
  Synthetic
DKDLRDILRKLREVLEEIERRLRKNTEDVKKVVDDDRKRNKDNTDEVRKAIREIEERLR

SEQ ID NO: 14727 - protein, 57 aa, Artificial Sequence
  Synthetic
SEIERLLEEDTKRLRDWEEAIRKNLEDSEREAKKLKDRVKKLLDDARRDIDRLKKER

SEQ ID NO: 14728 - protein, 59 aa, Artificial Sequence
  Synthetic
EEILDEVRRRLKTLNDDVERLLREVHERSKKLRETVRKIVEEVEKRITELRDRVRRAAK

SEQ ID NO: 14729 - protein, 57 aa, Artificial Sequence
  Synthetic
SDIDRLLEEDKKKLDDWRRAIEKNLEDSERRAREIKERLKKLLDEVRREAERLKEER

SEQ ID NO: 14730 - protein, 59 aa, Artificial Sequence
  Synthetic
EDILREIAKRIEDLNKEVEDLLRTVHKESRRLDREVEEIVRRVKEEIDRLIREVREAAK

SEQ ID NO: 14731 - protein, 57 aa, Artificial Sequence
  Synthetic
SEVDKLLEDDRKALEEWERRITKNLEDSKREIDDIRRRLRKNLEDSRRAIKEMKDRR

SEQ ID NO: 14732 - protein, 59 aa, Artificial Sequence
  Synthetic
EEILKRIADEIKRLNDEVKKLLEEVHERSRRLIEELRRLLEEVHRRSRKLIREVEEAAR

SEQ ID NO: 14733 - protein, 60 aa, Artificial Sequence
  Synthetic
SAEEEIEERLKRAIDRDEESVKRSAEEIKRLIEELKKSVDDSARELKELIERLKKLKKDG

SEQ ID NO: 14734 - protein, 58 aa, Artificial Sequence
  Synthetic
KEIKDLLDRVKKEVERSKRKSAKLLKELEDAIKEIEDRSRELLERAREELKRVKDDKR

SEQ ID NO: 14735 - protein, 59 aa, Artificial Sequence
  Synthetic
DETKRVRDLIRELIKRDEESVRRSARTLEELIRRLEESVKRSKKLVEDVIRKLKKLVKD

SEQ ID NO: 14736 - protein, 58 aa, Artificial Sequence
  Synthetic
EEAKKLLEDVEEAVERSKRKSRKLLEDARRALEKVKRDSDKLLEDVREEVERVLRTVK

SEQ ID NO: 14737 - protein, 60 aa, Artificial Sequence
  Synthetic
DELEKIAEELDKLIRDDKKSVDESKRLLEDLIRRDRESVEESERELTELRRRLDELRRRG

SEQ ID NO: 14738 - protein, 58 aa, Artificial Sequence
  Synthetic
REIKELLKRVRELVRESKERSRAVKERLKEEVKESERRSRELLERVRRDLEKIERDTR

SEQ ID NO: 14739 - protein, 59 aa, Artificial Sequence
  Synthetic
SELERIKKELEELIERDKKSVKDTARRLEEMERRLRESVRKSEEDLRRMIEKLEKLVTD

SEQ ID NO: 14740 - protein, 58 aa, Artificial Sequence
  Synthetic
DEARKLLEDVKRLVEESKRESKRLLDEVKKVIDRLRERSEKLLRDVERALREAEERTR

SEQ ID NO: 14741 - protein, 60 aa, Artificial Sequence
  Synthetic
EEDERIRRDLEEAIRRDRKSVEDTREELRKMIEDDERSVRDSEEKLKELIKRLEELVREG

SEQ ID NO: 14742 - protein, 58 aa, Artificial Sequence
  Synthetic
DEIRELLRRVRELVKKSKDDSRKLLEDVKRELERSKEESKRLLDEVKRAIDEIRERDK

SEQ ID NO: 14743 - protein, 60 aa, Artificial Sequence
  Synthetic
SELERIEEELKKLIEDDKKSVDDTRKELDRAIEEDKRSVERSERDLRRMIKKLEDLVRRG

SEQ ID NO: 14744 - protein, 58 aa, Artificial Sequence
  Synthetic
DEIRKLLEEVKKLVEESKRTSEELLKEVDRRLRRSEDESRKLLEEAKKAVKRIEEETR

SEQ ID NO: 14745 - protein, 59 aa, Artificial Sequence
  Synthetic
DELEEIKRRLKELIDRDRESVKRTEDELRELIKRLRKSVDDSRKEAERLIRELERLVKE

SEQ ID NO: 14746 - protein, 58 aa, Artificial Sequence
  Synthetic
DEIRELLERVERALRESKERSRKLLEDVRRAIEKVERDSEKLLKDVEEALERVKRERD

SEQ ID NO: 14747 - protein, 60 aa, Artificial Sequence
  Synthetic
REEDEIRRELKELIERDERSVEETRKELEELIRELEELVKRVEDDLRRLIEKLEDLRRKG

SEQ ID NO: 14748 - protein, 58 aa, Artificial Sequence
  Synthetic
DEARKLLKEVEELLRRSKRKSEELLKRVEELLRKAREDIRRLLEEVKRVIDKVKKDTD

SEQ ID NO: 14749 - protein, 57 aa, Artificial Sequence
  Synthetic
SDVERIIRENERKAKEIKDKVRKVIEDNERSVEEIKEKAERIVREVRKTLEEIRKRI

SEQ ID NO: 14750 - protein, 59 aa, Artificial Sequence
  Synthetic
KEMVERVERLIEEVARRSEELLRRIAKLVEDVNRESERLIREIKELAREVEKELKERAD

SEQ ID NO: 14751 - protein, 57 aa, Artificial Sequence
  Synthetic
SEVDDIIRKNEELLKKIEDDARKILKENEERVEEIKERIKKLIEDDRRKLEEIKRRI

SEQ ID NO: 14752 - protein, 59 aa, Artificial Sequence
  Synthetic
EEALDRIRKLIEKVKRESEKLLEDIKRLIDKVDKDSERLLRTVKKLSEDVEKELKDTTK

SEQ ID NO: 14753 - protein, 57 aa, Artificial Sequence
  Synthetic
SEVDEIIKDNERELDEVRREVEEIDKENKERLKEWVEEAREILDRLRKDLEEIRKRV

SEQ ID NO: 14754 - protein, 59 aa, Artificial Sequence
  Synthetic
REALDRLRRLIEKVVEDSRRLIKKVDELLKKVNKEIEDLVREVKDLVRRVKEELDRRVK

SEQ ID NO: 14755 - protein, 57 aa, Artificial Sequence
  Synthetic
EEAERILKKDDDSVRKIKKEADRIVRENERLAEEIKKEVRKIIEDDKRTLEEIEKRI

SEQ ID NO: 14756 - protein, 59 aa, Artificial Sequence
  Synthetic
EEMLRRVEEDLRRVNEESERLIRRIAKEVKRVTDESKKLLEEVKRISETVIEKMKEDAR

SEQ ID NO: 14757 - protein, 57 aa, Artificial Sequence
  Synthetic
DEVEEILKRDEEALRDIEKKVREVDERNRREVEKIKEKVKEIIKRDKDELDEIRKRI

SEQ ID NO: 14758 - protein, 59 aa, Artificial Sequence
  Synthetic
EEVLKRLEEEARRVNKTSKDLLKEVEDKIRKVNRKSEELLKKVEELSRRVIEEMRRRVK

SEQ ID NO: 14759 - protein, 60 aa, Artificial Sequence
  Synthetic
RELEELIEDLRRALERSREEVTRLLKDLEDANRRSHRHNEELIKRLRKILKEARDRVKRD

SEQ ID NO: 14760 - protein, 59 aa, Artificial Sequence
  Synthetic
EEALKDLRRVVEEVKKRSTDLNREVAKVIEEVKKRSEDLNRELEKLNRDIEERIDRETR

SEQ ID NO: 14761 - protein, 61 aa, Artificial Sequence
  Synthetic
REEEEARKILERLEEELKRSLDEVRDLIEKATKESKDVNEKIRKLLEELKEELRKVVEDTG

SEQ ID NO: 14762 - protein, 55 aa, Artificial Sequence
  Synthetic
EELVKDVERKLKRVAEESRKLVEDLRRRIKESREEIKRLVEDLERVLKEIKEEAK

SEQ ID NO: 14763 - protein, 61 aa, Artificial Sequence
  Synthetic
REEEEALKRIRETSERIKRVVDDLHRRNKKSTDDIKRRVDELHKRNEKIVREVLDVIRRRG

SEQ ID NO: 14764 - protein, 56 aa, Artificial Sequence
  Synthetic
SEVLRELDRRTKELKRRADELVTENRKLSKELEDEIRRLAERNRDAIRKIDKAVKE

SEQ ID NO: 14765 - protein, 61 aa, Artificial Sequence
  Synthetic
DEEERALETIRDTSRRIEERIDDLRRRVEKIVRDIEETIRRLHEENRKIAERVKEVIERRG

SEQ ID NO: 14766 - protein, 56 aa, Artificial Sequence
  Synthetic
SEVLKELEDETRRVKERVDKIIKELEERVEDVERKVRELVKRNEELLKKIKDDADK

SEQ ID NO: 14767 - protein, 61 aa, Artificial Sequence
  Synthetic
SREEDAVRKIRKLVEDVTRETKKMLEDVRRLVETVEKLTDDLLEEVRRLVEEVEDEIRRAG

SEQ ID NO: 14768 - protein, 56 aa, Artificial Sequence
  Synthetic
SELLREVEDLLRRHHETVRRILDEIRRLIERHHRRVREILKELDKLVKDAADEVRR

SEQ ID NO: 14769 - protein, 60 aa, Artificial Sequence
  Synthetic
SEVERVEEEVKRLATEVEKSNRDSLREIEDLNRRDRDISRRVKEEIERLIREVKKLIDDR

SEQ ID NO: 14770 - protein, 60 aa, Artificial Sequence
  Synthetic
EKKVKELLERAKKIADELRKHIKRTLKKVEEEVEKNKRDNDKLLEEARELIKRLDDEVRR

SEQ ID NO: 14771 - protein, 60 aa, Artificial Sequence
  Synthetic
DDLERVRKEIEDLNREDKRRSEEVRREVKKLIEDLEDSNRRSLEEVDRLVETVRELIDRE

SEQ ID NO: 14772 - protein, 60 aa, Artificial Sequence
  Synthetic
KEKVKRLLRTVRELMKKNKRDNDRLLKEAEDEARRVKRHIKESLKRIEEEIRRLKERLER

SEQ ID NO: 14773 - protein, 60 aa, Artificial Sequence
  Synthetic
DELEKVAEDIKKLNKEDRDRSDEVRRAVKELVKEVEKKDKDIKRRAEELIREIKEDIERR

SEQ ID NO: 14774 - protein, 60 aa, Artificial Sequence
  Synthetic
REKVRKLLEDVEREARKNEEDNRKLLKDIREEIRRLADRSRKTLEDAKRLIEKIERDLEK

SEQ ID NO: 14775 - protein, 57 aa, Artificial Sequence
  Synthetic
SEVEEVLKEIEEMLRDLERRVKESDEENRDSLRKIREDVERVDEENRDTLRRIKEKV

SEQ ID NO: 14776 - protein, 55 aa, Artificial Sequence
  Synthetic
EKVMKEVRDVIARLRDELEKVTEDSRRVNKELKKRLEDVVREIRRANEELDERVR

SEQ ID NO: 14777 - protein, 57 aa, Artificial Sequence
  Synthetic
DEVEKVLEEIKRALDDLRKKVEESKREIKEALKRVEKHTRDSDTDNKRTLREIEERV

SEQ ID NO: 14778 - protein, 55 aa, Artificial Sequence
  Synthetic
ERVVEEVRRVLEELRRRLEKVTEDSRRAIERLEREDRRVSKKSKDVNKKLDDDVR

SEQ ID NO: 14779 - protein, 55 aa, Artificial Sequence
  Synthetic
DSARKVEREVEEAARRVERTLEDVTRKVRELHDEVRRRLEEVKRRIEDLHRRVDE

SEQ ID NO: 14780 - protein, 59 aa, Artificial Sequence
  Synthetic
KDTVKRVLDDVARIVKRIEEDIKRVLEESKKLVRDIEKEIRDVKKESRDLVREIREKIR

SEQ ID NO: 14781 - protein, 56 aa, Artificial Sequence
  Synthetic
SSAEEVKRELEERHRDLRRTDEELRKDLDRVHDRARKILEEIEKKIRDMHRKVKER

SEQ ID NO: 14782 - protein, 59 aa, Artificial Sequence
  Synthetic
ERKVKKVRDESNKVVEEIMRHSDKVLERSRRLVEEIRRRLEEVLRTSREVVRRIRDEVR

SEQ ID NO: 14783 - protein, 55 aa, Artificial Sequence
  Synthetic
REVEEVLKEIEEMLKRIEDDVRRVLEEIKDVARRNEDEVRKLLRENEESVEEIKR

SEQ ID NO: 14784 - protein, 55 aa, Artificial Sequence
  Synthetic
RKVVEEVRKLLTDLKRLLEEVVKEVRKRLKELHDRTRTVAEEIRDINKKLKEEVN

SEQ ID NO: 14785 - protein, 60 aa, Artificial Sequence
  Synthetic
SSVDEVRRTIEELIRRVEELVKRSKDHVDETERRVKELVRRSHELTKEVIERVEELLRRL

SEQ ID NO: 14786 - protein, 59 aa, Artificial Sequence
  Synthetic
EDKVRKLVEDLRRALEKIRREIEKSTEESDRVLRRIEEEIRRDSEELKRALREAEEEVR

SEQ ID NO: 14787 - protein, 58 aa, Artificial Sequence
  Synthetic
SEVEELLKEVERLVREVEERVRRLHETDRKLLEDVKRKVEELHREDKKLADEVREAVK

SEQ ID NO: 14788 - protein, 58 aa, Artificial Sequence
  Synthetic
EDVERLRRELEKVAEKIRRLVEANRKTVEDARREIEKLLEENRRELDKVRRDVEREAK

SEQ ID NO: 14789 - protein, 62 aa, Artificial Sequence
  Synthetic
KEVDDLLKEVRRLVREVEKELKRLHDENRKSSEEIARRLEELHKESKELVERVKETLRDLRK

SEQ ID NO: 14790 - protein, 59 aa, Artificial Sequence
  Synthetic
EKVVRDLEREVREALRRLEEILRRDEDDVRRSREELKRIIDENREEVKRVLRELEETLR

SEQ ID NO: 14791 - protein, 60 aa, Artificial Sequence
  Synthetic
SEVDELVERNERLVDEVRRRVEDVARKLEKVSRDSDDLVRRSNEELEDRLRKVEKRVREE

SEQ ID NO: 14792 - protein, 59 aa, Artificial Sequence
  Synthetic
KKKLDEIRERSKRANDTLRKLLEDIRKRVEDSIRRLDELLKRSETRVRDIIKKLEDELR

SEQ ID NO: 14793 - protein, 60 aa, Artificial Sequence
  Synthetic
DEVDELERRNERLAEDVRRKVREVEERLKELSKRSMDIVKDVLRRLKELVDRVEKKVREK

SEQ ID NO: 14794 - protein, 59 aa, Artificial Sequence
  Synthetic
EKKVEEIREKSERVNRDLEDKLRKIEEKVKESEKRLRDLLREIEERIKRAIEKLERDLK

SEQ ID NO: 14795 - protein, 60 aa, Artificial Sequence
  Synthetic
SKVEELTERLRRLSKRSEEEVEKSNKDNDELVRRVLKRVKEVMRELEKLVEKVKEDVRRE

SEQ ID NO: 14796 - protein, 59 aa, Artificial Sequence
  Synthetic
KETLDRIRKEVEDSIERLKKLLDDSRRRSKEANDALRKLLKEIEDTIRRAIEELERARR

SEQ ID NO: 14797 - protein, 60 aa, Artificial Sequence
  Synthetic
SRVEELTEENRRLAKRLKEVVKKVLDELRRRVEEVKERVERSNKKLRDLVREVDERVATK

SEQ ID NO: 14798 - protein, 59 aa, Artificial Sequence
  Synthetic
EEIVRRIEEESKKVNRELEELLRKIEDDIRKAEEELRELVERSKREVDKALDDIDRRTR

SEQ ID NO: 14799 - protein, 61 aa, Artificial Sequence
  Synthetic
KEVDDVKKELDDVDREVKELIKRAHDKNRKVVKEVEDELRRLTEDDKRVADKVRELLKKVR

SEQ ID NO: 14800 - protein, 59 aa, Artificial Sequence
  Synthetic
KDKMKEVEDEVRKVLDTIRKLLKRDEEAVKEALDKVKKMLDDARRHSEKVLREVEDTLR

SEQ ID NO: 14801 - protein, 56 aa, Artificial Sequence
  Synthetic
SEVEELLKEVRELARRIEEEIKKLHRRNEELARRIKETIKRLIDENRKLAEDVRRD

SEQ ID NO: 14802 - protein, 58 aa, Artificial Sequence
  Synthetic
EDAKRIRDELERVRKSIEKLIRDNERFLEKVERDIRKLIEENEDLLRKIKEDVERKEK

SEQ ID NO: 14803 - protein, 56 aa, Artificial Sequence
  Synthetic
DEVRELLETVRKLAEDVERRIRELIKENERLAREVERRIKELHDRNRELAREVEEK

SEQ ID NO: 14804 - protein, 58 aa, Artificial Sequence
  Synthetic
KEAREIERELEKVKDTIRRLLERNEELLEEIARRITKLLEEDKELLERIERRIAEKLK

SEQ ID NO: 14805 - protein, 60 aa, Artificial Sequence
  Synthetic
SEVETLLRELKRLAEEVKKRIEELDRELKKLSDDVRREIERLIRENERLAREVLKEIRDL

SEQ ID NO: 14806 - protein, 59 aa, Artificial Sequence
  Synthetic
EEALREIEKLLRKVEEDVRRLIEKLKKSLEDSARDVDRLVKENERILEEVAREVEKLLR

SEQ ID NO: 14807 - protein, 60 aa, Artificial Sequence
  Synthetic
KEVEDLLRDLKRIVDEVEKRIRKLIEDNKRLADEVRERIERLHKRNKDLAEEVLKRVREL

SEQ ID NO: 14808 - protein, 59 aa, Artificial Sequence
  Synthetic
KEVVKRIKEELDRVREEVKKLIKRNEELLKKVAEDVRRLLEKDKKALEEIKRRVEDELR

SEQ ID NO: 14809 - protein, 56 aa, Artificial Sequence
  Synthetic
DELEELRKRVKENEDEVEKVLRELHKLNEENKEEVDRALEELRKRVRDIEEEIKKE

SEQ ID NO: 14810 - protein, 60 aa, Artificial Sequence
  Synthetic
RKDVVDKVRKVIEEVHKRSRDLAKEAREVNRRVHETTKKLVEDVRRVIEKVEEDVRRKVK

SEQ ID NO: 14811 - protein, 56 aa, Artificial Sequence
  Synthetic
SSLEEADKKVDKNRRDVDRALEELHRRNKRNEEEIRKALKENRETNKRLLEEIRKN

SEQ ID NO: 14812 - protein, 60 aa, Artificial Sequence
  Synthetic
REDAVRRVDKVIKEVHDESKRLVDELRDRNRRVHDETRRLDEESKKINRTVEELIRRKET

SEQ ID NO: 14813 - protein, 61 aa, Artificial Sequence
  Synthetic
DKVEELLKRLEESTRRILKRVEELLRENERLAREVRKTVERLLEENRRLIEEVERRVRRDK

SEQ ID NO: 14814 - protein, 59 aa, Artificial Sequence
  Synthetic
EKLRRELRRLLRESEKKIKEMLDRNKELLDEIERTIRELLKRNEDLLREVRERAKEADK

SEQ ID NO: 14815 - protein, 60 aa, Artificial Sequence
  Synthetic
DEAEDLLRKLKRSTDEIKKTVEKLLRENEKTSRDIEREVRELLRRNKELAERVEEVARRE

SEQ ID NO: 14816 - protein, 59 aa, Artificial Sequence
  Synthetic
EKVRRELERLLRESEKEIRKLLKRNKELLDESRDTIREMLERNKRLLEEVRKKIEKMKE

SEQ ID NO: 14817 - protein, 61 aa, Artificial Sequence
  Synthetic
SEAERLLEELKRSTDEIKKRVEKLLEDNKRTSEEIEEEVRRLLETNRKLIEDVKRKVERDR

SEQ ID NO: 14818 - protein, 59 aa, Artificial Sequence
  Synthetic
ERVRRELEKLLRDSERKIKEMLERNEKLARDSEERIRRMDDKNKDLLRRVKETIERKLK

SEQ ID NO: 14819 - protein, 61 aa, Artificial Sequence
  Synthetic
DEVEDLLRKLEESTRRILERVKKLLEDNKRLIDRVRKEVERLLRDLKRLAKEIDEEVRRDN

SEQ ID NO: 14820 - protein, 59 aa, Artificial Sequence
  Synthetic
ERVIRELEELLKESKKRIDDALRENEKLLREVKRRIEEAERTIKELLEEIKRKIAEEEK

SEQ ID NO: 14821 - protein, 60 aa, Artificial Sequence
  Synthetic
KEAEELKRRLEDLVRRVEEDNRRLLEEHKKLVKDVRKRAKELLETHKKLVEDVTREVRKS

SEQ ID NO: 14822 - protein, 59 aa, Artificial Sequence
  Synthetic
REVLEDLKRDLERARKINEESEKRIKDSDKRVHEEIRRVLEEVKKSDEEVRRRADRERE

SEQ ID NO: 14823 - protein, 60 aa, Artificial Sequence
  Synthetic
REVDELRKELERIVKEVEDVIRDLNKKLKDILKDVKDKSDELNERLKKIVEDVRRLIRDV

SEQ ID NO: 14824 - protein, 59 aa, Artificial Sequence
  Synthetic
DKMVEELERLLDEARRRVEEAIRSNEELLKRIEEESERTVRSNEKLLKEAEEEVRRAEE

SEQ ID NO: 14825 - protein, 61 aa, Artificial Sequence
  Synthetic
DEVEDVERDLKRILKEVKDRSDELIERNRKSTEDMKRRSKELNEELRRIIEDIRRLIRDTK

SEQ ID NO: 14826 - protein, 59 aa, Artificial Sequence
  Synthetic
SKMVERLERLLEEAERTSRETLKRLEDTLRESEKRSRETVRSNEELVKEVTKEVEDAKK

SEQ ID NO: 14827 - protein, 60 aa, Artificial Sequence
  Synthetic
DEVETVLRDNERTTKEAEDDVRRLNEELKEIIKRVREVSKRLIDELRRILEDVERRAREV

SEQ ID NO: 14828 - protein, 59 aa, Artificial Sequence
  Synthetic
SDFVERLRRTLEESKDKARRNVESNRELLERARKDSKRTLEELERLLETVRKSVDEMKK

SEQ ID NO: 14829 - protein, 61 aa, Artificial Sequence
  Synthetic
EREERLEEKLKKSVDDSRELIERVLRKHEKVSDKVRRELERILEDHKRVLEEIKRVLKDRR

SEQ ID NO: 14830 - protein, 55 aa, Artificial Sequence
  Synthetic
ERLKDLLDKAHEEDRRAKEEVKRLLEDTTKKIKEFLDRVERSNEEVERELEKAER

SEQ ID NO: 14831 - protein, 60 aa, Artificial Sequence
  Synthetic
DKDRKIKRIIEEVKKTIRKLLDDVRRINEEVLKELRKLLREVEEINKEILRRLKELVKTS

SEQ ID NO: 14832 - protein, 59 aa, Artificial Sequence
  Synthetic
EKVKKELDDEIRDAERELREAKKDMDRSNEELREEIKRAEERLRRLDEKLREEVEKDRK

SEQ ID NO: 14833 - protein, 60 aa, Artificial Sequence
  Synthetic
SVKEEIKEMLKKIKRHSDEALKKNKETLDRDRKRVEDVIRELKKLLDEIRKRVEDVRRRV

SEQ ID NO: 14834 - protein, 59 aa, Artificial Sequence
  Synthetic
EEIARKVRELLERVLRDDRRVVREVEELNRRMHKKNEEVAKKVRDLLREVRKELEDVDR

SEQ ID NO: 14835 - protein, 63 aa, Artificial Sequence
  Synthetic
REAEELLKELDEIIRRVEEEVKRLLDKVRETTKRIEEEIRKLDEDLKEIIREVEERIRKLKSD

SEQ ID NO: 14836 - protein, 59 aa, Artificial Sequence
  Synthetic
EEVERRIKRLREKVKKKIDELKERVRRLLEESRRKAERVEESNRDLLRELKERLEERRR

SEQ ID NO: 14837 - protein, 60 aa, Artificial Sequence
  Synthetic
SFEEEIKKIADEVEKRIRDAEKRSKDILEKSREVVERAKRRSEKLLRDAEREIKRVMEEK

SEQ ID NO: 14838 - protein, 55 aa, Artificial Sequence
  Synthetic
DEMLRRLKKVTDDVRKRLEDSHRRLEKVTEESRKRADESHEELRKLIEEVREKLK

SEQ ID NO: 14839 - protein, 58 aa, Artificial Sequence
  Synthetic
SSKERIEKILREVKREIEEAEKRSRDILKDSERIMRDVKRTTDDLLRKAEEIIREVAK

SEQ ID NO: 14840 - protein, 55 aa, Artificial Sequence
  Synthetic
EEVLKRLRELIDTVRRVLEESHKRLRELTKRSEEEARRVNEELRELIDRVRREAE

SEQ ID NO: 14841 - protein, 60 aa, Artificial Sequence
  Synthetic
DVEKRIEELRERSDRIIDEARKRSEKLLRESEKMMRDVDKTTEDILREAEEEIKRVLDEK

SEQ ID NO: 14842 - protein, 55 aa, Artificial Sequence
  Synthetic
ERVLKDLERLSKESEDELRRSHEELKRLTEESRETIEDVNRKIKEKIEDVKRKLK

SEQ ID NO: 14843 - protein, 60 aa, Artificial Sequence
  Synthetic
SAEDSIRELLERDERLLEEARKEAKRLNEENERLLERIEETVRRLLEEIKRLLDDIRKKI

SEQ ID NO: 14844 - protein, 59 aa, Artificial Sequence
  Synthetic
EELVKRVEERIKRLHDENRRLVKEVIEEVEKLIRDNEKLAEDIEREIRRLLKELDEAAK

SEQ ID NO: 14845 - protein, 60 aa, Artificial Sequence
  Synthetic
SEVEEIVKEIEKLIKENEEVVREVEKEIRELIKRNREVVERIRKELEKMLRELERLAREG

SEQ ID NO: 14846 - protein, 58 aa, Artificial Sequence
  Synthetic
EARERIKELVRRNERLLREVEKRLKTLSEENKKLLEDAKRELDRILKEVRDLLRETER

SEQ ID NO: 14847 - protein, 59 aa, Artificial Sequence
  Synthetic
SRVERLSAEIKKLIDENRRVAEELLRELEKLLKDNEDVVREVERRIRDSSRKLEELARA

SEQ ID NO: 14848 - protein, 58 aa, Artificial Sequence
  Synthetic
EAREDMDRLVRENERLLKKVEDDLRKLSEENKRLVDRARERLARLLEENERLVDERRK

SEQ ID NO: 14849 - protein, 56 aa, Artificial Sequence
  Synthetic
REAEEALKRVKEILKRIAEEVERVLTEVKKLSEDVKRRVEEVLTRLKRSTEEIERK

SEQ ID NO: 14850 - protein, 56 aa, Artificial Sequence
  Synthetic
KKLVEDVDREIKKLLEEVTKKAKRLNDENKRLLDDVRDKARRVIEESREVLERARK

SEQ ID NO: 14851 - protein, 59 aa, Artificial Sequence
  Synthetic
SSEEEVEKLERKVRAVIRKAEEDLEDSLRKSEKMAKEVTDEIEKSRRKAKAVIDDARRR

SEQ ID NO: 14852 - protein, 55 aa, Artificial Sequence
  Synthetic
EEVLKKVEELIRKVEKVIRTVLEEDRKVSEDSLRKMRKVLKEDEDVIKEVRDRAQ

SEQ ID NO: 14853 - protein, 59 aa, Artificial Sequence
  Synthetic
SMKEEVDRLLKEVKDVIREVRERIKKSEEDVRRVIDDARRKLEELSKRAREVVEEVRRR

SEQ ID NO: 14854 - protein, 55 aa, Artificial Sequence
  Synthetic
EEVLKRVKELIDEVRERIEKVLTDDRRLIERVKREIERVIRENEKVIRDARERLR

SEQ ID NO: 14855 - protein, 60 aa, Artificial Sequence
  Synthetic
DEVEKLLRDLEELDRDIERKVRELLKRNKEVLDDIEREVRRLEKELRRIIKEVADVIRKT

SEQ ID NO: 14856 - protein, 56 aa, Artificial Sequence
  Synthetic
KKEVDKIEKHSRDLIERAKRETDRLLEEAERLMREVVDRVRKILEEAKRLIDEARR

SEQ ID NO: 14857 - protein, 60 aa, Artificial Sequence
  Synthetic
DVEDEARRLEKELRDILREIADDIRKLLEENKELLKESEKDIRRAEKAIEDILDDVRKRI

SEQ ID NO: 14858 - protein, 59 aa, Artificial Sequence
  Synthetic
EKLLTEVSEEVKRLADELRELARRVKEEVKKLLDDNRETTDRIRRTVTELLEELKRKTK

SEQ ID NO: 14859 - protein, 60 aa, Artificial Sequence
  Synthetic
SVDETITEVIKRIEDTLRKVKEDADRLDERNKALLEDSKKKIKEVEEELRRILEEVRRKV

SEQ ID NO: 14860 - protein, 59 aa, Artificial Sequence
  Synthetic
RELVEEVKERAERLLKELEDLIKKVKEEVERLLEENRKTTEDILKRAKDLARELRKRTK

SEQ ID NO: 14861 - protein, 60 aa, Artificial Sequence
  Synthetic
DAKESIEEVKKRLEKSLEDSERESRKTLEENKDLLRRSREEIKKALDRLKDLLRRAEERI

SEQ ID NO: 14862 - protein, 59 aa, Artificial Sequence
  Synthetic
EKLVEEVEREVERLLRENEKTSDEIKKTSEELLKRNEETTRRILEEVERLLKRVKEATD

SEQ ID NO: 14863 - protein, 60 aa, Artificial Sequence
  Synthetic
KVEETATRLREEVKRSDTEVHRENRESEDRNKKSDEEVHKTIRDALKRVKDKLDDVRRRR

SEQ ID NO: 14864 - protein, 59 aa, Artificial Sequence
  Synthetic
DEIVRRVKEEVERLLEEHRRLAKRVRDENRRSTEEHRDLVRKVKREIERLEEELDRAEK

SEQ ID NO: 14865 - protein, 60 aa, Artificial Sequence
  Synthetic
KVEESADRARREVKRSDEEVRKRNTDSREEIKKSDKEVHERIRELLERIRRILDEVRKKR

SEQ ID NO: 14866 - protein, 59 aa, Artificial Sequence
  Synthetic
DEIVRRVEDEIEKLLREHRELVKDVERENRRLLEEHKKLVEEVEREVRRMMKKLRDATK

SEQ ID NO: 14867 - protein, 60 aa, Artificial Sequence
  Synthetic
KVEEEIEKLLRHNDELLKEVEKRAREVEERIKRSDEAVHDSIRKLLEDVKRILDEARRRR

SEQ ID NO: 14868 - protein, 59 aa, Artificial Sequence
  Synthetic
DEIVERVEREVRKLDDDDRRLAERVLRRAEELLKRHKELVERVEREVERLLKELEDAVK

SEQ ID NO: 14869 - protein, 60 aa, Artificial Sequence
  Synthetic
KAEDEARRLERHNKELLKEVRKDNTRSEREIEESDKRAHDEIKRLEEEVEEILKDIERRR

SEQ ID NO: 14870 - protein, 59 aa, Artificial Sequence
  Synthetic
DEIVERVRRTVKKLDEDDDKLVKDVRKENKDLLRRHEELVREVTERVKKLLRDLREASR

SEQ ID NO: 14871 - protein, 60 aa, Artificial Sequence
  Synthetic
DVEDEVRRAEESNRDSDRKVHEEVRRVLKSNRDSDTKAHRDVEEAKRRLKTELKDIERKR

SEQ ID NO: 14872 - protein, 59 aa, Artificial Sequence
  Synthetic
KRLVDKVRTEIKRLNDEHRKVLKKVRDLVRKLNEDHERVVRDVRREIKRLRDELRETAR

SEQ ID NO: 14873 - protein, 60 aa, Artificial Sequence
  Synthetic
DVEDEVRKMKKELDELLKRAEEEVKRVLESNEKSDDEVHKRAREAEEELRRLLDDVRRRR

SEQ ID NO: 14874 - protein, 59 aa, Artificial Sequence
  Synthetic
KKVVKDVEKKIRDLLTKLREVLRRVRREVKKLNERHEDILREVERLIEELRKRLEDTTK

SEQ ID NO: 14875 - protein, 60 aa, Artificial Sequence
  Synthetic
DIEDEVREAIERLKKLLEDSEREVRESIKRLRDLLREIARESEEANERIKRLLEEIERKV

SEQ ID NO: 14876 - protein, 59 aa, Artificial Sequence
  Synthetic
EDVRRRLRELVEKVMREIEDSNRKLRKLSKDSEKAVRDAERRNRKLVREIEDRIRKSLK

SEQ ID NO: 14877 - protein, 60 aa, Artificial Sequence
  Synthetic
EVDKEVRKVLKDIERLLEEIERRVRKSIEDLKTELKKIEDESEKANRELERLLREIKDRV

SEQ ID NO: 14878 - protein, 59 aa, Artificial Sequence
  Synthetic
EDVRRELRELVDKVRKDVERVMKALEDLSRESRREVRRVKEKNRRLVEEVKKRVEDKAK

SEQ ID NO: 14879 - protein, 59 aa, Artificial Sequence
  Synthetic
SEDEDMVRDVKRLIDEVRKLIERVKREVEDLIRRLNELDERVVRTSEELARDVKRLVDA

SEQ ID NO: 14880 - protein, 56 aa, Artificial Sequence
  Synthetic
SEDVERLKEEIKELLDRARRTIEELERRIRENVKRSRKKIEDLVRRHKKILDEARK

SEQ ID NO: 14881 - protein, 59 aa, Artificial Sequence
  Synthetic
REKEEAVKTVKELIKEVREMVERLHRKNEEMIRTVREVVKELNERNKELIKTVRDLRRR

SEQ ID NO: 14882 - protein, 56 aa, Artificial Sequence
  Synthetic
SEDARRLEREVRELLRDVREKVERNKEKVERLKREVRKRVRDDLERVKRLKEEVDT

SEQ ID NO: 14883 - protein, 59 aa, Artificial Sequence
  Synthetic
SEDERAVREVEKLIKRVEEVVRRLNERNRRLIEEVRRIVEELHRRNEDLIRKVRELAER

SEQ ID NO: 14884 - protein, 56 aa, Artificial Sequence
  Synthetic
SREMERLEREVERLLREVERRVKEDEERVRKLLEEVERLVRRNARKVEELLKEVEK

SEQ ID NO: 14885 - protein, 63 aa, Artificial Sequence
  Synthetic
SEKEKLTEDIERIIDKVRREVERLNEENERLIREVRKRVEKLNRENKEAIKRVEEEVRRLRDR

SEQ ID NO: 14886 - protein, 56 aa, Artificial Sequence
  Synthetic
EELVKRLEEKIRELLKRARDLVKEDEDRIRKLLEEIERVNRDDKRKIDKLLEEVRR

SEQ ID NO: 14887 - protein, 60 aa, Artificial Sequence
  Synthetic
KSDEEVRERVERLLREVRRLTREVRRHAKETLDTVAELVDRVRREAERLLREVEELLRRL

SEQ ID NO: 14888 - protein, 56 aa, Artificial Sequence
  Synthetic
ETEVRDVKRKADEIKEEDKRILEEAEKRHKELLEDLKRLLDRIKEEVKRVREDIKT

SEQ ID NO: 14889 - protein, 59 aa, Artificial Sequence
  Synthetic
REEDEARKRLKELLDRITKLSKEVRDLIREMLRELEESIERTKREIDDLLRRLEEIRRA

SEQ ID NO: 14890 - protein, 56 aa, Artificial Sequence
  Synthetic
SDEVERVKREIEEHLRRSEEDIRRVAEEIKKLVEESRRVIEEAKDRVRRLVERVKK

SEQ ID NO: 14891 - protein, 60 aa, Artificial Sequence
  Synthetic
SEEDDARRKVEELLRRDKKVVDEVRDELRKLLEELRRLSEEVEKLIRKLEKELREVRKRG

SEQ ID NO: 14892 - protein, 55 aa, Artificial Sequence
  Synthetic
ETVKKVEDEVRDSLRRAKKIIEDAARAIRKHLEESKRRIEEARKRLEELLKEAED

SEQ ID NO: 14893 - protein, 59 aa, Artificial Sequence
  Synthetic
SREEEAKKEVKRLLDELKKLSDDSRKRIRESHERLKRVIEEVRREAERSHEELERVIRR

SEQ ID NO: 14894 - protein, 56 aa, Artificial Sequence
  Synthetic
EKDVRKVDRDVDEILKRSEDIIRKVKEDSERLLKEVRERIEEMKKRTDDLLKEAEK

SEQ ID NO: 14895 - protein, 60 aa, Artificial Sequence
  Synthetic
RKEETLKRAEEKSKETLERNKRLLERIEEESRKTLEKNKDMLRRVKKRVEDLLREIKRDK

SEQ ID NO: 14896 - protein, 56 aa, Artificial Sequence
  Synthetic
EEELRRVIEDVLRESEKLHREDEELARRVLEESERLHREDEELARRVEKEIRELKK

SEQ ID NO: 14897 - protein, 56 aa, Artificial Sequence
  Synthetic
SLDELAKKAKEDSERSVRTDEKRLEEIARRIKELIKENEDLLREVKKEIDRLIEEI

SEQ ID NO: 14898 - protein, 56 aa, Artificial Sequence
  Synthetic
EEEARKLLEDIKRRSEELHKRNDELAREVEKRIRKLIKENRELAEEVRRRIEELRR

SEQ ID NO: 14899 - protein, 56 aa, Artificial Sequence
  Synthetic
RTDETVKKIEEDSRRSLEEDRKELEEVERRSRESIKENERLLREVAERIKRLIEEI

SEQ ID NO: 14900 - protein, 56 aa, Artificial Sequence
  Synthetic
EKTLKELADRIKERSEELHRRNEKLAREVLERSKELIKRNEELARRVIEEIKKLKK

SEQ ID NO: 14901 - protein, 60 aa, Artificial Sequence
  Synthetic
DVEETLKTVEDESRKTIETLRRSLRKSEEESKRSIDRLRESLERSREEVERLLREIERDK

SEQ ID NO: 14902 - protein, 59 aa, Artificial Sequence
  Synthetic
EEAVEKLKKLAEDVRRESEELRRELEELSKDVRRVSEELERRLRKLSEEVKKRIKDLKR

SEQ ID NO: 14903 - protein, 60 aa, Artificial Sequence
  Synthetic
SVEKILRDVEDTSRRTIEELKRSLEESKKTVTKLLEENKDLLRRIKEDVRRRLEEIKRDK

SEQ ID NO: 14904 - protein, 59 aa, Artificial Sequence
  Synthetic
EEAVERLKELAEEVKRVSKELLEELRKISEEIERRIRRLIEENKELADRVREEIERLKK

SEQ ID NO: 14905 - protein, 61 aa, Artificial Sequence
  Synthetic
DKVDRVIEEARRILERLRKRVTDVVRELEEINRRLKREVDESVKEVDEILKKLEERVRKRK

SEQ ID NO: 14906 - protein, 56 aa, Artificial Sequence
  Synthetic
KELVEKLDREVKRLLKEARELSEENRRRSKKLLDELRKSSERIREKVEDLVRRIRK

SEQ ID NO: 14907 - protein, 59 aa, Artificial Sequence
  Synthetic
SEEEAAKRRIDELLKRLKEVSDKVKEDIDELLKDLERRSREVVEEIKKLLEEVKDRVRK

SEQ ID NO: 14908 - protein, 56 aa, Artificial Sequence
  Synthetic
SERLKRVTEEAKRLHEENKKLLDDVRREARRLNEDNRRLLDEVRKRVEEVLRRIRK

SEQ ID NO: 14909 - protein, 61 aa, Artificial Sequence
  Synthetic
DEDRRALEEVRRVLEEDKRVSKRSRDLIEKVLREVEELIKEVTKRAEDVLRRVREIIKTSG

SEQ ID NO: 14910 - protein, 56 aa, Artificial Sequence
  Synthetic
RELVKKVEDEIKESEDESEDLIRRADEAVKRLRKRVRDVIEKARRDLEKIVTDAKK

SEQ ID NO: 14911 - protein, 59 aa, Artificial Sequence
  Synthetic
SIEKLIEDVRREVERIEEESKKLVKKAREDVKRSHDHSKRLMEEATRRVRDILRRAEEM

SEQ ID NO: 14912 - protein, 59 aa, Artificial Sequence
  Synthetic
KELVDDARRRVEELLRRLEDSLRKSERLVRELLKRSKEVDDRIREEVKRLLEELDDRRR

SEQ ID NO: 14913 - protein, 60 aa, Artificial Sequence
  Synthetic
DTEEILKRIEEEIRRLLEENEKLLRDAEDTVRKSLEEHERILDEVTKRIRKMLEEIARTD

SEQ ID NO: 14914 - protein, 56 aa, Artificial Sequence
  Synthetic
DETLKRLAEEVLREVERLLRENERLIREVERRADKTVKDLEKLIEEVERRIDELKK

SEQ ID NO: 14915 - protein, 60 aa, Artificial Sequence
  Synthetic
DSKEIIDKVREDIKRADEENKRLLEEVRDRIRKLLEENETLLKDSERKARELLEELRRKD

SEQ ID NO: 14916 - protein, 56 aa, Artificial Sequence
  Synthetic
EEDLKRLAKEVKDRIRELLERNRELIKEVEKRVRRLLDENRKSSEEIRKEVEDRKR

SEQ ID NO: 14917 - protein, 60 aa, Artificial Sequence
  Synthetic
SDEERALKLVEDVIRDVKRLNKRDRELIEKVERDIEKLLEDHRRLVDEVRRRVKELEDKV

SEQ ID NO: 14918 - protein, 56 aa, Artificial Sequence
  Synthetic
SELLKEVEERIKKLLKSNKDLLREVEERVRRALERVKRSDEEVHKMARDALRRVRK

SEQ ID NO: 14919 - protein, 60 aa, Artificial Sequence
  Synthetic
SEDEDAERLVEEVIRRVKELLDTHKRLVEEVERKIRELDKKDAELVKEVEKRAEDLRRKV

SEQ ID NO: 14920 - protein, 56 aa, Artificial Sequence
  Synthetic
SELLERAEREIRRLLREVKESDKEVHRRVRRMLEHNKDLLRRARDSIKKVLDEIRR

SEQ ID NO: 14921 - protein, 60 aa, Artificial Sequence
  Synthetic
SEREDAERVIERVEREIRELNRRDEELIRRVEKEIRRMLEEHKTLVKEVTRELDRLRREV

SEQ ID NO: 14922 - protein, 56 aa, Artificial Sequence
  Synthetic
SEDLKRVDKKVRDVLRSNKELLDEARKRITKVLEEVRRSDEEVKRRAEKVLDEVRK

SEQ ID NO: 14923 - protein, 60 aa, Artificial Sequence
  Synthetic
SEEEDAERAVREAAELAKKANKEDEELARRAAELAKKALREHEELVERAARLADEAEKKA

SEQ ID NO: 14924 - protein, 56 aa, Artificial Sequence
  Synthetic
SERAKKAEDDARKAAEDNRRLAKRAKEEARRAAEEVKKSDKEAEERARRAAERVRR

SEQ ID NO: 14925 - protein, 56 aa, Artificial Sequence
  Synthetic
SLERLLEEVTRRSEETVRTNEEILRRAADEVRKAIESNKDLLRKIKKEVDDVKRRL

SEQ ID NO: 14926 - protein, 56 aa, Artificial Sequence
  Synthetic
EESVRTIIEEVERTSREMNERLKKIIDEVRRTIEELNKDLKRILEEIRELVKRLET

SEQ ID NO: 14927 - protein, 56 aa, Artificial Sequence
  Synthetic
SLEETLEEVDRKSKETVKRLKELLDRIRERVEEAIKSNEDILRRIKAEAEEAERRL

SEQ ID NO: 14928 - protein, 56 aa, Artificial Sequence
  Synthetic
ESEVERIIRELERVSRELMELLKKILEEVRKRIKELNDRLEEILRRVRKRIRELEQ

SEQ ID NO: 14929 - protein, 56 aa, Artificial Sequence
  Synthetic
SLEELLERIKRDSDRTVRELEELLERAEEISRRTEKSNEDSLRRSTKEVKEAEDRL

SEQ ID NO: 14930 - protein, 56 aa, Artificial Sequence
  Synthetic
EEVVKKMLDELRDRSEKLLRTLRDIIRRAKERSDDLNRKNKESTEKVREDIRRLEQ

SEQ ID NO: 14931 - protein, 56 aa, Artificial Sequence
  Synthetic
KLEELLKRIAEESKKTVEELEKLLEEVERISKKTVEELEDSLRRSEEDAKEAEERL

SEQ ID NO: 14932 - protein, 56 aa, Artificial Sequence
  Synthetic
EDDVRRILEEVRRLSEELKTRLRKILEDLRRLSEKLKRENEESTKTVRKVIEDLER

SEQ ID NO: 14933 - protein, 56 aa, Artificial Sequence
  Synthetic
SLEELLKRIKERSEETVKRLEDLLKRVREDIDRAIKELKKSLDDSRKTVEDIEREI

SEQ ID NO: 14934 - protein, 56 aa, Artificial Sequence
  Synthetic
EEKVKEIAEEVRRRSEKMLEELKKLVDEVRKRLEDLRKRNEDSTEEMKKRVEEEKR

SEQ ID NO: 14935 - protein, 57 aa, Artificial Sequence
  Synthetic
SEVEKVIKDNKRSVDEIRKTLKRVLERNEKTLRENEKKIRDIIAEVDKRLKDLEREI

SEQ ID NO: 14936 - protein, 59 aa, Artificial Sequence
  Synthetic
DKAIKEIEEEVRRVDDRVRKLVEKLDRDIKEVDDRSRKLTDDLRRKVEEVLRRIKETVT

SEQ ID NO: 14937 - protein, 55 aa, Artificial Sequence
  Synthetic
REVEEIEKELRKIIRDLKELLRELRERLEKLDRDLKDLLRRLREENREILDRLRK

SEQ ID NO: 14938 - protein, 55 aa, Artificial Sequence
  Synthetic
EKVIRDADRMAKELKKDLRKVLEDNRRTVEKLKRDLEEVDKESDEEARKLREEIR

SEQ ID NO: 14939 - protein, 63 aa, Artificial Sequence
  Synthetic
SESEKIEREIRKLIDDSRKNSERIRREIEKLIRDSEETSKEIKKEIEDLLRELKEMLDEIKKR

SEQ ID NO: 14940 - protein, 55 aa, Artificial Sequence
  Synthetic
EEVLRRAKKALEEDKKRNDEVLDEVRKALEEDKKRNDKVLEDARRVIKKIKDELK

SEQ ID NO: 14941 - protein, 63 aa, Artificial Sequence
  Synthetic
KDEETIRRRIEELLKRSEDNSERIRRTIRELLERSKKLSEEVRKRIEELLKRLDEKVKEIRKR

SEQ ID NO: 14942 - protein, 55 aa, Artificial Sequence
  Synthetic
EEVLKEAEKRLREDKKRNDEVLKRVTEAVEEDKKRNDDVLEKVERAIREIARKLD

SEQ ID NO: 14943 - protein, 60 aa, Artificial Sequence
  Synthetic
SEEEKVIRDLERLLEENEEHSRDVERKLRESDKRLREMVKKVSDEIRKLDEEVEELLRRG

SEQ ID NO: 14944 - protein, 55 aa, Artificial Sequence
  Synthetic
EDALRRVKEALERSKKRLDKVLKDHEDSVRELKKEIDDVLKRNEETVREIEKRAR

SEQ ID NO: 14945 - protein, 60 aa, Artificial Sequence
  Synthetic
EEVERVKRELERLLEENDEHSKEVEKRIRDLDRKAEELLREIEERLRRSDERLKRLLERG

SEQ ID NO: 14946 - protein, 55 aa, Artificial Sequence
  Synthetic
ERVLKKVEDDLRESEKRVEEVLRKNEETVRRLKEELRKVLEDHKRTVEELRRRLT

SEQ ID NO: 14947 - protein, 60 aa, Artificial Sequence
  Synthetic
SREEEVEKRIREVLKRLEELLADVERRARELNRRLEKVVRDVKKEIEDLDRKLRKLLKDG

SEQ ID NO: 14948 - protein, 55 aa, Artificial Sequence
  Synthetic
EKVLKDVTDMARELERRLEEVLRKHRKSSEDLKRRIDEVLKRNEETLREIDRRLN

SEQ ID NO: 14949 - protein, 60 aa, Artificial Sequence
  Synthetic
SEREKAKRELERLLEEDRKHLKDVERELKELDEEDERHLREVEKELKELDDRAKEALDRR

SEQ ID NO: 14950 - protein, 55 aa, Artificial Sequence
  Synthetic
EEVLKEVKRLSEKSKTDLEKIVRDNKRSSDDSRRELERVIRENEETLRRLAERIK

SEQ ID NO: 14951 - protein, 60 aa, Artificial Sequence
  Synthetic
KEEEEAKKELDDLLRRLKDLYRRIREELERLDRRLEEAYRRIKEDLKRLDEELRRLLEKD

SEQ ID NO: 14952 - protein, 55 aa, Artificial Sequence
  Synthetic
EKVIRDVRKASRDTEREIRKVAEDNRKSSEDSRRKLEDVLRKNKETLDRLRDELR

SEQ ID NO: 14953 - protein, 60 aa, Artificial Sequence
  Synthetic
DEKETVEEELRRLLEELKKHIEDTERKLRKLDTDLEDVYRRIEEELRRLLEELKKMLDDR

SEQ ID NO: 14954 - protein, 55 aa, Artificial Sequence
  Synthetic
EKVLRDVEEALRRAKKRSDDVVRENEKSSRRSEERLERVLRDAKRVLKELKERID

SEQ ID NO: 14955 - protein, 61 aa, Artificial Sequence
  Synthetic
SELEEVLKRVAEVVERVSREDEKVNRKNDAAVKKVTKDDRKVLEDLERKLRELEKDAKDRG

SEQ ID NO: 14956 - protein, 59 aa, Artificial Sequence
  Synthetic
EDVIRRLEKEVRDVLKDWEEKSKEAEEKNKTVNKRWEDESRRLKKKVDRLIEKIKEDLR

SEQ ID NO: 14957 - protein, 60 aa, Artificial Sequence
  Synthetic
RSEELLREIEERIKRLKEKNEELVKEIRRRARELEREDDRAKKEIDDLARKVEEKIRRTI

SEQ ID NO: 14958 - protein, 55 aa, Artificial Sequence
  Synthetic
DDVVREVRKLIEELDRHLERLVEEVRRVVKELLEISKEILDRVREVITRLREEVK

SEQ ID NO: 14959 - protein, 59 aa, Artificial Sequence
  Synthetic
SEVEDAVRKIRELAKEIARAIDELLKEHEELIRTVADALEKLVRTSDKLAEDIARVIDG

SEQ ID NO: 14960 - protein, 56 aa, Artificial Sequence
  Synthetic
RELLEELKRILEDLERRAKEIVDRARELNKRAEDEIRRLIEDSKRKLEEIRKRIEE

SEQ ID NO: 14961 - protein, 59 aa, Artificial Sequence
  Synthetic
KEAEEAVKRLRDLVRRVEEETKRLLRESRESLKTLEEITDRLLKRSEESVKEIEKVITR

SEQ ID NO: 14962 - protein, 56 aa, Artificial Sequence
  Synthetic
RELLTEVTKLIKDHHDKVREILRESDKELDRHHKDVERILERSKRELERLEDEVRR

SEQ ID NO: 14963 - protein, 57 aa, Artificial Sequence
  Synthetic
SREELLKEIKKKIDDIKRENEKLLRDIERLIRELEKRDKELLDEARKTSEELVRRAG

SEQ ID NO: 14964 - protein, 55 aa, Artificial Sequence
  Synthetic
RDVVRDVDRILTEWKKESEDLVEEVKELIKRWKDTSEELVRRVRELNERIDRETR

SEQ ID NO: 14965 - protein, 60 aa, Artificial Sequence
  Synthetic
SEVETVEEKVKKVIEDLRRLLKEVRDRNRRIIEEIKRLLERVAEKNKRIVDEIRDLLRRR

SEQ ID NO: 14966 - protein, 56 aa, Artificial Sequence
  Synthetic
EDIIRRIDELFREILKEVKRLNEESKRRLEKLEEDIKRLDDRSREEAEKLRDAVRR

SEQ ID NO: 14967 - protein, 60 aa, Artificial Sequence
  Synthetic
SEVEKVARDVEEVIRTSEDKTRKLEKRNKDIIREIKKLLDDLARENKRIADEIKRKLDER

SEQ ID NO: 14968 - protein, 56 aa, Artificial Sequence
  Synthetic
KRLIDEIRREMERSHRRDEEVNEKSKREADKLRRDVEKLDEDSARELKKLEDEVRT

SEQ ID NO: 14969 - protein, 60 aa, Artificial Sequence
  Synthetic
SEVERVERELDKVITDLRRLLDDLKRKNEELVRRIRELLKKVKERNKKIVTEIDDLLRRR

SEQ ID NO: 14970 - protein, 56 aa, Artificial Sequence
  Synthetic
ERIIRRIKELADRIEERVKELNERVREEVRKLEEDIKKLDDESREEARKLEDKVRQ

SEQ ID NO: 14971 - protein, 60 aa, Artificial Sequence
  Synthetic
SSEEIRREIERESEDTRRRLDRVLEDIERLSRETKEHIKESLERVRREHDRLRRELERKA

SEQ ID NO: 14972 - protein, 55 aa, Artificial Sequence
  Synthetic
EEVRREVRKLIEESRRAIDEVKRRVEELIKESRDRNRRIEERVKELVKENAERIR

SEQ ID NO: 14973 - protein, 60 aa, Artificial Sequence
  Synthetic
KSEEIRRKIEEDSRRTKKELDDILDEIRKLAEKVKKEIEELLRKVRRRHEDMKRRLREKV

SEQ ID NO: 14974 - protein, 55 aa, Artificial Sequence
  Synthetic
EEVAKEVKKLIEESRKLLEELKDTVRRLIKRLKELLEELERRVEELIKENEERIR

SEQ ID NO: 14975 - protein, 60 aa, Artificial Sequence
  Synthetic
RSEDILREIEDLSRETKEKIDEILERIRKLAEEVKRHIDESLKEVRRRHEEADRELDEKM

SEQ ID NO: 14976 - protein, 55 aa, Artificial Sequence
  Synthetic
EEVAKEVRDLIRRSEDLLRRILETVDKLIKELRKLNEDILERVRKLIKKNKDDIK

SEQ ID NO: 14977 - protein, 60 aa, Artificial Sequence
  Synthetic
KSEEIERRIRERSRETRRELEEVDKKVKKRHTELREHLKRSLKKVKEDHDDLKRKLEEKI

SEQ ID NO: 14978 - protein, 55 aa, Artificial Sequence
  Synthetic
EEVEEEVKRLIEESKELIKRLEEEVDKLIRDNKKLNDDILRRVKRLAEENDERIR

SEQ ID NO: 14979 - protein, 60 aa, Artificial Sequence
  Synthetic
SSEDILRDIERIARKLREDLKRVLKRVKELSDDTRREIERLVEEVERIHERLRRELERKV

SEQ ID NO: 14980 - protein, 55 aa, Artificial Sequence
  Synthetic
ERVADEVRKLIAELEKLIRDLKRRVDELIRRSRELLERIRDRVRKLIEENKRAID

SEQ ID NO: 14981 - protein, 59 aa, Artificial Sequence
  Synthetic
SKVEEAKREVDRVIKELREDIKRVEEEVDKLIKDHEKLNKELEDESRKLAERVEKLRRD

SEQ ID NO: 14982 - protein, 56 aa, Artificial Sequence
  Synthetic
EKIVRDIKELLRDLRREVEKVIERIDRLIKRLEEESRRLFEESEKAIRELKRRVDK

SEQ ID NO: 14983 - protein, 59 aa, Artificial Sequence
  Synthetic
KKVEEAKKEVKEMIRRHRERNKEVEKEVKDLARKHEKENRDVAETSKRLAEKVKKLRDD

SEQ ID NO: 14984 - protein, 56 aa, Artificial Sequence
  Synthetic
EEIVKDIKREIEELEDESRRILEEIREDIDRLRRRSEKLFEDSRELIERMKREVDR

SEQ ID NO: 14985 - protein, 60 aa, Artificial Sequence
  Synthetic
DEIEKVRKRAEDLNREDKRLSERAFEESKEVVEEHRRLSDRARRESDRVVEEVEKTLKDK

SEQ ID NO: 14986 - protein, 56 aa, Artificial Sequence
  Synthetic
RKILEEIRKAIDRNRDENRRLVEESKKELDELRKEDEELVERSKRKLEELDRRAKK

SEQ ID NO: 14987 - protein, 60 aa, Artificial Sequence
  Synthetic
SRIETVKDELRRIAEDVRRALEEIEERLKDLNRRDEELTKRIEDTSRDILRRVEEVLRRN

SEQ ID NO: 14988 - protein, 56 aa, Artificial Sequence
  Synthetic
EKILKEVADRLRELKRRAERLIEEVTRLLKENEKRNKEVVDTSREALREIRDRVRK

SEQ ID NO: 14989 - protein, 57 aa, Artificial Sequence
  Synthetic
SKEDILREIEKRIRKIEKEAEELLRESRKILEELEERDRRLLERVKREIDRLLEETG

SEQ ID NO: 14990 - protein, 59 aa, Artificial Sequence
  Synthetic
EELLRRVERELKKLIDEVRKVLKDNFDRNRELAKEWEDLSRELFKRAKELIEKVEEASR

SEQ ID NO: 14991 - protein, 57 aa, Artificial Sequence
  Synthetic
SKEDILREIKKRIEEIERDARRLLEESKRILDELRKTDEKLLRESEERVEELERKSG

SEQ ID NO: 14992 - protein, 59 aa, Artificial Sequence
  Synthetic
EELLKRVMEELRELIERVERELRRNARENRELARKWKKLSEENKKKNDDLIREVDEASR

SEQ ID NO: 14993 - protein, 60 aa, Artificial Sequence
  Synthetic
DEKERIEEEIRRILEELERKVDEAREEIKRMDEELKRRIEEIARRSRELDDELRERVDKD

SEQ ID NO: 14994 - protein, 55 aa, Artificial Sequence
  Synthetic
EEVRKEAERVLRKIEEDIDRVLRENEDSVRKLRTEIDRVEEENRRSAKRIRERLK

SEQ ID NO: 14995 - protein, 59 aa, Artificial Sequence
  Synthetic
DEVRDVVTRIRDLLRRIKERLEELTERIRRLLEKIHKTTEDLARRNRKLIDEIRKEIDK

SEQ ID NO: 14996 - protein, 55 aa, Artificial Sequence
  Synthetic
EDVKREVKELLDKIREDLERVREEAKRSNEENRKRLEEVVEESERLLEELKRRST

SEQ ID NO: 14997 - protein, 55 aa, Artificial Sequence
  Synthetic
DEVREVLKELKKVLREIEKAVRDVLEEDREMHERIARKVKKVLDENKKSLDDLRR

SEQ ID NO: 14998 - protein, 59 aa, Artificial Sequence
  Synthetic
EKKLKEIADKIRELLERLKDRLEKIAREIRDVNRKLDEDLEDIVRRIRDVDKKLDDKTK

SEQ ID NO: 14999 - protein, 63 aa, Artificial Sequence
  Synthetic
SVLEEIEREVEEIRRRIEKVLKELNDDDRRVIEDSKRLNEKLEKEVRDIERKARDLLRKLKDT

SEQ ID NO: 15000 - protein, 59 aa, Artificial Sequence
  Synthetic
REELEKLKRRLDEELDRVREKVEENIRRTDKAVEDSERENERLKRELDEKVKRIRDELR

SEQ ID NO: 15001 - protein, 55 aa, Artificial Sequence
  Synthetic
SDEEDVERLVKELIDRVRKTDAELERKVDEVIRELKEVIKRIEDHSRDSIRKLRN

SEQ ID NO: 15002 - protein, 55 aa, Artificial Sequence
  Synthetic
RELIKRLRDAVRESEKENKRINERLRRVIEKAKRDLEKILEEDRRVLEEMAERAK

SEQ ID NO: 15003 - protein, 56 aa, Artificial Sequence
  Synthetic
SEVETIKREIDKLMKELTEKIKRIKEEDDKVHEELKRAVDRSRERLEEVLKELRDR

SEQ ID NO: 15004 - protein, 59 aa, Artificial Sequence
  Synthetic
EKEIRDLMREIREVAERAKKRVDELLERIRRINTKLKEELKELHKRTEDLIKKAKEEVN

SEQ ID NO: 15005 - protein, 56 aa, Artificial Sequence
  Synthetic
KEVEEIDERLKRVLEELRRMLEESRKEDERVHDELRKEAEKIKRELDKAVEELRAR

SEQ ID NO: 15006 - protein, 59 aa, Artificial Sequence
  Synthetic
KKVIDDLLRKIEKLIREMKKRLKDLHEETKRINEELERRLRDLERRVRDLLRRAREEAN

SEQ ID NO: 15007 - protein, 56 aa, Artificial Sequence
  Synthetic
SEIERIKEEDEEVHKRLKEINDRINKEDKDVHDKLRDEARKIEERLRRVMEELRAN

SEQ ID NO: 15008 - protein, 59 aa, Artificial Sequence
  Synthetic
EKVIRKLLEEIRRINEELERRNRKLMKDIREINERAEEKLRRLAEEIEELIKKLKEEVK

SEQ ID NO: 15009 - protein, 56 aa, Artificial Sequence
  Synthetic
SEVEEIKREDDKVHEDLKKAADDIRKRDEDVNRKLTEAIEEIRREVDKALEDLERR

SEQ ID NO: 15010 - protein, 59 aa, Artificial Sequence
  Synthetic
EEVIRRLMEKIRRINAELRKALKRLLEEIEDINRKLEEEVKKILEEIRRVLEELRRRAN

SEQ ID NO: 15011 - protein, 61 aa, Artificial Sequence
  Synthetic
SEVEELVKELRRLIEEWDRRSKRLMEELKELAERIDKTTKELLKELEDLVEKIKRELDKKG

SEQ ID NO: 15012 - protein, 55 aa, Artificial Sequence
  Synthetic
ERVAEEVKRAIERAKRESDKIERDVRELNRRNREILKKIKKRVEDVLRKLRKDLE

SEQ ID NO: 15013 - protein, 59 aa, Artificial Sequence
  Synthetic
DEVEELKERLRRLAETIARRIRELVERLRDSARKIEKRVRELAKKLRDSVREITKVIKD

SEQ ID NO: 15014 - protein, 55 aa, Artificial Sequence
  Synthetic
EEIREEVEKAVRDLEELLKELKRESEETIRRIEKLVRDLERESEEAVRRLKEEKD

SEQ ID NO: 15015 - protein, 59 aa, Artificial Sequence
  Synthetic
SEEEKLKKELEDLARRIEKRLRELVEELERSVREIERRIEKLHKELEESVDRIKKVVDK

SEQ ID NO: 15016 - protein, 55 aa, Artificial Sequence
  Synthetic
DEIRRRVEEVVRRLEKIVKELEERSREVLKRLREEIEKHKKRSEETKERIRTRAT

SEQ ID NO: 15017 - protein, 59 aa, Artificial Sequence
  Synthetic
SEVEELLKRLEDLIRKIEERLKELVKRLKESAKEIEERLEELHRRLKESVDRIREEIEK

SEQ ID NO: 15018 - protein, 55 aa, Artificial Sequence
  Synthetic
EEIKKEVKKALERLKKIVEDAKKVSEETMERIRKLVEEHKDTSRKTVEDLERATK

SEQ ID NO: 15019 - protein, 59 aa, Artificial Sequence
  Synthetic
DEVERLMEELRRLLEEVRKRIEDLIRENRKLVKEIKDRLEKLLRDNERLAREIEEVIRS

SEQ ID NO: 15020 - protein, 55 aa, Artificial Sequence
  Synthetic
ERIREEVKRAIEKLKELVEDSNREVTEALKEIEDLLRKLKERSEELLRRIKARTD

SEQ ID NO: 15021 - protein, 60 aa, Artificial Sequence
  Synthetic
KEVDELDEELKKHAERIDRELERLDRENEKHVEDVRRELERLREENERHARRIEDEVKKR

SEQ ID NO: 15022 - protein, 59 aa, Artificial Sequence
  Synthetic
RKTLEDIRRKVEKSLRELEKKLEEIDKKNRDTLEEARRELERIRRENEEVIRRLDKRRR

SEQ ID NO: 15023 - protein, 60 aa, Artificial Sequence
  Synthetic
KEVEELVRKLREHVRDIKRKLEELLKENEDHARRAEDRLRELTKENRDHVKEMEDVLRRD

SEQ ID NO: 15024 - protein, 59 aa, Artificial Sequence
  Synthetic
KDTLERLEREVRKSIKELEDKLREIRKRNKEVIDKLRDILEKIKKENREALKRLRDTEE

SEQ ID NO: 15025 - protein, 60 aa, Artificial Sequence
  Synthetic
SEVEKLTEELRRHVEEIERDLDRLRKENERHAKKIKDELKRLLEELEEVARRIEAELERD

SEQ ID NO: 15026 - protein, 59 aa, Artificial Sequence
  Synthetic
KDMLRRIEEEVERSIRRLEELLERIRERNEKVIEDLKELLKRIRDRAEEVKDRLRRTRK

SEQ ID NO: 15027 - protein, 60 aa, Artificial Sequence
  Synthetic
SEVEKLKKELEDHVRDIEKKLRDLMRENEEHAKRARERLKKLLEDNEENVKDIEDKVRKK

SEQ ID NO: 15028 - protein, 59 aa, Artificial Sequence
  Synthetic
EDTLRKIREDAKRSEKKLEEILRTIRKRNEKVIRDLRRLLEELRKRNREAIERLRKELE

SEQ ID NO: 15029 - protein, 60 aa, Artificial Sequence
  Synthetic
SEVERLAEELRKHVEEIKKELRKLKEKLEKLARDIERELKRLRDENKKHADDIRDKVEKR

SEQ ID NO: 15030 - protein, 59 aa, Artificial Sequence
  Synthetic
KDTLRRIEEEVKKSERELREELKRLEERVRRVIEKLEDLLRRIEKENEEVKRDLERRRK

SEQ ID NO: 15031 - protein, 60 aa, Artificial Sequence
  Synthetic
SEVDELKRRLDEHAKDIRDKLRKLVKELREHAKRAEDELRRLLKENEDNAREIRELVKTL

SEQ ID NO: 15032 - protein, 59 aa, Artificial Sequence
  Synthetic
EKTLRDIKRAVEKSIRDLERILEELRKEVEDTIKRLEDILREIRKRNKDVIDDLRRRMK

SEQ ID NO: 15033 - protein, 60 aa, Artificial Sequence
  Synthetic
SEVDRLVRELDKHVEDIERTLKKLREENEKNVEEIKRTLKKLVDELRKLAREIIDTVDKN

SEQ ID NO: 15034 - protein, 59 aa, Artificial Sequence
  Synthetic
EKTLRDIKRRVDKSLEDLKRTLEEIKRENERTLEEIKKILEDMEREVRDIERKLREKEK

SEQ ID NO: 15035 - protein, 60 aa, Artificial Sequence
  Synthetic
KEVEDLVRELEKLIEEIKRRLEELDKELKKHVEDAERRIKKLLDENRENAERILEKLRRD

SEQ ID NO: 15036 - protein, 59 aa, Artificial Sequence
  Synthetic
EELLRRAKERVREALEDLRRILEEIRRKVEETIRRLEKLLKELRDRNRRVLEELERTLK

SEQ ID NO: 15037 - protein, 60 aa, Artificial Sequence
  Synthetic
REKEEIKREVEEAKKRLEDLLREIAEEVKRALERLRELNERNNDRARRVLKRLTDELRRV

SEQ ID NO: 15038 - protein, 55 aa, Artificial Sequence
  Synthetic
DRLSERLRRLVREIEETLKELLKALRRLLERIREVSEELHRRSEELVERILRKLK

SEQ ID NO: 15039 - protein, 60 aa, Artificial Sequence
  Synthetic
REKEDIEEKVKRVLERLERLNRENNKESERLLRRLEELNKRNNEAVKELLDRLREILKRV

SEQ ID NO: 15040 - protein, 55 aa, Artificial Sequence
  Synthetic
DRLMEELKRLAREAERVSEELHDRTRRLAEEIEKVSKELHKKSEKLAREIKKRLD

SEQ ID NO: 15041 - protein, 60 aa, Artificial Sequence
  Synthetic
KEAEELIKELKDLAERIRRENRRLLEELKKLVEEIRRRIRELIERSEDSVRKIEETVKRK

SEQ ID NO: 15042 - protein, 55 aa, Artificial Sequence
  Synthetic
EKAERELKKISEDDERSIKELEDLLRKVEEDIRRLLDELRDIMKKTKEKVDELRR

SEQ ID NO: 15043 - protein, 60 aa, Artificial Sequence
  Synthetic
DEAERVKRELERLVKEIKEENRRLLRELRELSKRSREVLERLLRKLEDLVRKIREVLERL

SEQ ID NO: 15044 - protein, 59 aa, Artificial Sequence
  Synthetic
KKVLDEIEKEAEEIKRENKDFNRRIEREVRESKREIEEVVKRIREIAERVDRDIDRTRR

SEQ ID NO: 15045 - protein, 60 aa, Artificial Sequence
  Synthetic
DEEREVKERLRDLTRRIRETIKRLLDKNKDLARRIREVNKETSEELERLARDIERVLEEL

SEQ ID NO: 15046 - protein, 59 aa, Artificial Sequence
  Synthetic
KKVLDEIREAAERVKREIEELLKEVHRINTELNKDNTELNKRNREIVERVKRRIDERAR

SEQ ID NO: 15047 - protein, 60 aa, Artificial Sequence
  Synthetic
DEVEEVKKALEDLAEKIRDLNRKILEKNKKLADDIRRLNEKLLRELRKLVEEIERVLRKL

SEQ ID NO: 15048 - protein, 59 aa, Artificial Sequence
  Synthetic
KELLDEIRRRVEEVKKDNERVNKEIEELNRKLDEDNERANREIRDTVEKVRRRIDEEEK

SEQ ID NO: 15049 - protein, 61 aa, Artificial Sequence
  Synthetic
SEIEEIEKEIRRVLEEIERLLRTLKKINDDVKRESEKLVRDDKKKIDDALRELRKLAAERG

SEQ ID NO: 15050 - protein, 59 aa, Artificial Sequence
  Synthetic
DEVVRRAEKLLKEIRDTVETALKELEDKNERSERENKRVAEESERKLRKIKEEVDKAAE

SEQ ID NO: 15051 - protein, 60 aa, Artificial Sequence
  Synthetic
RKVEEIKKRLKELKERLEESVKRIKDRLRKLEEDNRRLAEEVKKRLEELLKRLEDLVKRR

SEQ ID NO: 15052 - protein, 59 aa, Artificial Sequence
  Synthetic
EKAVKELEDELRRIEKTSRDVLKELEDILRRLREESKRVADELRELLRRVKEKVERETK

SEQ ID NO: 15053 - protein, 60 aa, Artificial Sequence
  Synthetic
SEDDRIRERLKELVDRNDELVKRIKRALDELLRELRKSVEDIKRTLDDLARKLEELARRR

SEQ ID NO: 15054 - protein, 59 aa, Artificial Sequence
  Synthetic
REVVEDLKRILRELEKRSEDVLRELKKKLDDVEKESRDVLRELTEKLKKIEEDVRRAEK

SEQ ID NO: 15055 - protein, 60 aa, Artificial Sequence
  Synthetic
REVEEIERRIRELLETNREIAERTTEEIKRLKKELEDSLEEIKKRLKELVDELRKLATDR

SEQ ID NO: 15056 - protein, 59 aa, Artificial Sequence
  Synthetic
EEAVRRLEELVREIEDRSERLNKENEDELKKIEETSRKALKELEDRLREVKKEVREAER

SEQ ID NO: 15057 - protein, 57 aa, Artificial Sequence
  Synthetic
DSDRELEKKIRDSLKRLEEALRELEERLKRSLEDDERVHEELRRRAERIRETIKKRL

SEQ ID NO: 15058 - protein, 59 aa, Artificial Sequence
  Synthetic
SELVKRMKERVDELHKRTEELLERLKEELKKLHDETRDINRELKKRLEDLERKIEEAAK

SEQ ID NO: 15059 - protein, 57 aa, Artificial Sequence
  Synthetic
KEAEELRRLIEESKRTDKKVHEDLKEEVRKIEEEDDKAHEELRKEVERIKKKIDDDM

SEQ ID NO: 15060 - protein, 59 aa, Artificial Sequence
  Synthetic
SELIKRLKDEVKKLHDETERINRELKKELDDLLRRVRKINKELKEELKKLERKIEEAAR

SEQ ID NO: 15061 - protein, 57 aa, Artificial Sequence
  Synthetic
SSREELEKRIRESEKRDREMHERLRRTAEKIEKEDKEMHDRLREKAERIEERIDKEV

SEQ ID NO: 15062 - protein, 59 aa, Artificial Sequence
  Synthetic
SELIERIAERIERLNRDTERINRELEEKLRRLLKRIREINTELDKRLKELLDRIEEASR

SEQ ID NO: 15063 - protein, 57 aa, Artificial Sequence
  Synthetic
SSEEKIEKASEDNERKVKEVLREIEELSKKDKTDVERVLRELEKRLEEIKREVDRRD

SEQ ID NO: 15064 - protein, 56 aa, Artificial Sequence
  Synthetic
EEDLKRELDEIDKRTEELARELRELMREIHERTKRLADDLRRAIDEIRKKIEEDAR

SEQ ID NO: 15065 - protein, 59 aa, Artificial Sequence
  Synthetic
DELEDLLRRHRELVKRSLERLKDLLERNRELIEDSERRAEELLRELRRLIEEIKKVLDE

SEQ ID NO: 15066 - protein, 59 aa, Artificial Sequence
  Synthetic
KKVLEELKRSNDEANERHKTVLRRLEEENKRANDSHRKIKEELKDLLRRVDETVKEKRR

SEQ ID NO: 15067 - protein, 59 aa, Artificial Sequence
  Synthetic
SRLEELLKTHKKLVEDSVDEVRRLLERNRKLIEDSKERLKELLRTNEELIRTLKEVLDR

SEQ ID NO: 15068 - protein, 59 aa, Artificial Sequence
  Synthetic
EEVLRRLKESNKKANEDHRRLNEENKDLNRRANEEHKKVNDRNKELLDRARRTADEKRR

SEQ ID NO: 15069 - protein, 59 aa, Artificial Sequence
  Synthetic
DEVDELVKTHERLVEESERRIEELLERNRRLIERITERAKELLKENKRLIEEITEVLKR

SEQ ID NO: 15070 - protein, 59 aa, Artificial Sequence
  Synthetic
KDVLERLKDSNRKANERHKRMNEENKRLLEDVERRIKELNKRNEDLLREAEKRVRDERR

SEQ ID NO: 15071 - protein, 60 aa, Artificial Sequence
  Synthetic
SELEELLKTHKKLVEDSVERVRDLLRENKRLIEESEKEIRKLLDELRELIERIIELVERG

SEQ ID NO: 15072 - protein, 59 aa, Artificial Sequence
  Synthetic
KEVLERLKKSNKEANDEHRRLNDENRELNERANRKHKEVEDRLKDLLRRAEEKLTEDAK

SEQ ID NO: 15073 - protein, 60 aa, Artificial Sequence
  Synthetic
DEVERLITKHRKLVEDSRRRVEELLRRNAELIKTSKRRVEELLERNRRLAEELRRLLKEG

SEQ ID NO: 15074 - protein, 59 aa, Artificial Sequence
  Synthetic
DEVLRRVEDSNRRANETHKDLNRKNKELNEEANRTHEELLRRNEKLLREIEDTVDRETK

SEQ ID NO: 15075 - protein, 60 aa, Artificial Sequence
  Synthetic
SEVEKLLKELEDESRKSEDDNRRLLEELRRLSEESLRDLRRLLEDLKRLAEEIEREVRKR

SEQ ID NO: 15076 - protein, 59 aa, Artificial Sequence
  Synthetic
DELKKRVDEVLETSRELLRESKRKIEEIARRSEEELKRVKDEVDDTARRIKRKIEEAEK

SEQ ID NO: 15077 - protein, 57 aa, Artificial Sequence
  Synthetic
DSERRLDEILERAREVNEESSRRLDKLLRETEEKNRKSTEELRKIVEDLKRTVKDES

SEQ ID NO: 15078 - protein, 56 aa, Artificial Sequence
  Synthetic
AETVIRRIEKLLEDLKRVDDKILEEHKDLSKKLDDVDREIKERIKKLIKDLKDTAR

SEQ ID NO: 15079 - protein, 57 aa, Artificial Sequence
  Synthetic
DSEEELKDILRKAKEDNDRSSDKLRRLLEETEKRNRDSTKRLEELLEETEREVRRRS

SEQ ID NO: 15080 - protein, 56 aa, Artificial Sequence
  Synthetic
AETVKERIKKLLKDLREVDREILERHKKMSDDLKRVDEEISKTHKELSRRLKETAR

SEQ ID NO: 15081 - protein, 57 aa, Artificial Sequence
  Synthetic
SKEEDLKRILEEAEKTNKESSDRLRELMDRTRRENEESSRTLKEIVKDADRRVAEII

SEQ ID NO: 15082 - protein, 56 aa, Artificial Sequence
  Synthetic
VERVKEDIERLLDELRKVDREILETHKKLSEELRRVDEEIIKRVKDLIRTLEKAAE

SEQ ID NO: 15083 - protein, 57 aa, Artificial Sequence
  Synthetic
SSEERLRTILREIEKTNRDSSKRLRDLLRETKRENKESSDELRKLLEETRDEVEKRR

SEQ ID NO: 15084 - protein, 56 aa, Artificial Sequence
  Synthetic
SDTVAERIRRLLEELKRVDEEILKTHKDLSDRLRELDEEIKKTHEKLSEELRRAAN

SEQ ID NO: 15085 - protein, 60 aa, Artificial Sequence
  Synthetic
KEVEEILETHKEIARELREVAEEIIRDHERILRDLEKKIRELRRTHERMVEELDRVAKEG

SEQ ID NO: 15086 - protein, 59 aa, Artificial Sequence
  Synthetic
KDALDKLRDSDRRVHEDVRRMLKRLDDSDKRVHDRVRKVLEDLKRSNDELRRTVEERER

SEQ ID NO: 15087 - protein, 60 aa, Artificial Sequence
  Synthetic
SEVEKILEDHKRIVDELEKEAKKIEETHTELVKRLREEVEKLKEELRRLLEELKDMARRG

SEQ ID NO: 15088 - protein, 59 aa, Artificial Sequence
  Synthetic
EEALRRLKKSDEEVHRRVREILKRLEKSNRDLNDDSRKVEEELKRILRRIEEEAKRTED

SEQ ID NO: 15089 - protein, 61 aa, Artificial Sequence
  Synthetic
SEAERLLDELRRLLEEIKRRIEELLEESKRSLEEVEKRSKELLDRLEDLLRKIKEEIRKDG

SEQ ID NO: 15090 - protein, 59 aa, Artificial Sequence
  Synthetic
EEVKERLERLRERIKREIDRVIRELRELDKRAKEVSKRTKEELEKILEKVRRVIEEVKR

SEQ ID NO: 15091 - protein, 61 aa, Artificial Sequence
  Synthetic
DDVDRLLDELRELIDRIRKDLERLLKESRDSLEELRRRSEELLKKLEEEIREVVERIRREG

SEQ ID NO: 15092 - protein, 59 aa, Artificial Sequence
  Synthetic
DELKRRAEKLLEDLRRVIEEIKRRLDKVNDEVREVSKETTDRLDDLVRKARELIRRVEK

SEQ ID NO: 15093 - protein, 61 aa, Artificial Sequence
  Synthetic
SEREKLLTDLRDLLKKVVDTLRRLNEELKKSIEESKETLERLNRTLKKLLDEVKKKLEDDG

SEQ ID NO: 15094 - protein, 55 aa, Artificial Sequence
  Synthetic
DELRKIVEEIRTELDRVRETNERILKEVRDEHRRVDKTNTDIERDIERVIKEVET

SEQ ID NO: 15095 - protein, 61 aa, Artificial Sequence
  Synthetic
KKDEDLKKLLKDNEDVMKKAADEVKRLNDENRDLMRRVAEKIEDLLRRLEKLLRDILRRRG

SEQ ID NO: 15096 - protein, 56 aa, Artificial Sequence
  Synthetic
SKTVKDRIKRLTDELERVNRELSEEHKRVLDELRKRNKEILDRLKELLKRLKEEAD

SEQ ID NO: 15097 - protein, 60 aa, Artificial Sequence
  Synthetic
SSEEELERLLEELRRITEEAKERMERSSKELEDVSREAEKRLEKSSRDLDKTVRDIKRRI

SEQ ID NO: 15098 - protein, 56 aa, Artificial Sequence
  Synthetic
AEDVKRRVRELIEEHKRLNKELLDESRELLKTHAELVKRILDESRRLLEELEKAAR

SEQ ID NO: 15099 - protein, 60 aa, Artificial Sequence
  Synthetic
SEREDATRRLRDIIRRLRDLIRRLTEESEESIKEIRERIERIIRTSEESLKELEERIRRN

SEQ ID NO: 15100 - protein, 55 aa, Artificial Sequence
  Synthetic
EDLERLREEIEDVVRKAEKRLDELHDEIRRTIEDAERRLDESNERAEKVVRDAEK

SEQ ID NO: 15101 - protein, 60 aa, Artificial Sequence
  Synthetic
SDEERALEKIRRLIEDLRRMVREMLERSKKSLEEHKELAREILRRSRESLERLKDVARRN

SEQ ID NO: 15102 - protein, 55 aa, Artificial Sequence
  Synthetic
RELDKLREELEEVVRRVEEKLDDSDRRANEVTREIEKTLDDLHREAEEVVKEIRR

SEQ ID NO: 15103 - protein, 60 aa, Artificial Sequence
  Synthetic
SVEETLRRLLEESERVNRRVKEDLDRIRRESEEVNKRAEEMAKELLDEIRKDIDRVRKRN

SEQ ID NO: 15104 - protein, 59 aa, Artificial Sequence
  Synthetic
EELAKEVIKTLRKLIEESKRNHEDLRRELRELIEESKRDHERLLRRLRELIKRIRDTTK

SEQ ID NO: 15105 - protein, 61 aa, Artificial Sequence
  Synthetic
DEIEDLLRRAEKLIRDLKRKNDKLLKESEELLERLRERAKEVLDESKKLLEELRELVRRRG

SEQ ID NO: 15106 - protein, 59 aa, Artificial Sequence
  Synthetic
ERAARDVERLKRRNKKVVEDSEDLARKTNKKSEELLREIRKRVEDSNRETKEILDRVRK

SEQ ID NO: 15107 - protein, 60 aa, Artificial Sequence
  Synthetic
DEDEELLKRLRDLIREVRDRVRRLLEEDKDSLRRIRERVEELLRRSEESLKDLEKKIREG

SEQ ID NO: 15108 - protein, 55 aa, Artificial Sequence
  Synthetic
EELKKIADKVEEVLREVEKELDKSRRTSDEILKKVEKAVRDLDRRVKEVIDRARR

SEQ ID NO: 15109 - protein, 60 aa, Artificial Sequence
  Synthetic
SEAEELLKRLERLLRESKKDLERLRKELKDLLEESRKDVTRLLDEIRRLLEEIKRRLDKR

SEQ ID NO: 15110 - protein, 59 aa, Artificial Sequence
  Synthetic
EEVKRMIEKLKKESEEVIRKAKEDLDRVTKESRRVIEEVERRLDELRERLREVVERVKT

SEQ ID NO: 15111 - protein, 60 aa, Artificial Sequence
  Synthetic
DEAEKLLKELRDLLEESRKDLERLLKELEDLLEESKRDLERLLEEITELLKRIKETVERR

SEQ ID NO: 15112 - protein, 59 aa, Artificial Sequence
  Synthetic
EEVKRKIDRLEEESRRVIEEARKRLEEVEEKSKKIIDDARRALDRIDKELRRVVEETRK

SEQ ID NO: 15113 - protein, 60 aa, Artificial Sequence
  Synthetic
SVEETARRLLDENRKLLEEAERIHTEINERNKELLKRADDLHRRVLEDLRKLLDKVAKEI

SEQ ID NO: 15114 - protein, 56 aa, Artificial Sequence
  Synthetic
ADTVVKRIKKVIDELEELNRKSKKELKEVIEDLERRNRDSIRRAEDLLRRLEEEVR

SEQ ID NO: 15115 - protein, 60 aa, Artificial Sequence
  Synthetic
KDEETVEKLLRELEELLKEAEERAKDLNRRNKELLDEADRRHEELLRRLEDLLRDVRRRI

SEQ ID NO: 15116 - protein, 56 aa, Artificial Sequence
  Synthetic
SDTVSERIRKVIREIERLIKEIVKEIEKLIRDLEKRNRESLKEIKDLLKKLKDEVD

SEQ ID NO: 15117 - protein, 60 aa, Artificial Sequence
  Synthetic
SRKEKLLTELKEILKRLKEEVEKIVKESEKSIEEHHRRSERLKRESKKSLDDLAKILERS

SEQ ID NO: 15118 - protein, 55 aa, Artificial Sequence
  Synthetic
EELEKIRREVEELLRRAEEELRRLNREIEENHKRVKRELEKIDKEMKDLLREAKR

SEQ ID NO: 15119 - protein, 60 aa, Artificial Sequence
  Synthetic
DRKERLKERLERLLKEHHDRSRELLRTSEESIRRHHEESRRLLRRSKESLDRLRDELRRL

SEQ ID NO: 15120 - protein, 55 aa, Artificial Sequence
  Synthetic
EELRKLERRARENHKRVREALERLNRRIEENHKRVRRRLEDLDRAAEELLREAKR

SEQ ID NO: 15121 - protein, 59 aa, Artificial Sequence
  Synthetic
SRKEDLKRRLEEIIKRLEEVVRRILRTSEESLKDHHEASKRLLEESEKSLKRLEEELKR

SEQ ID NO: 15122 - protein, 55 aa, Artificial Sequence
  Synthetic
EELRKIEERIRELAKRAREELDKLDKEVRKNHERVKRRLEELDRRAKELVREERR

SEQ ID NO: 15123 - protein, 60 aa, Artificial Sequence
  Synthetic
SEKEKLLKEIERLIEELRRVVKKAVEDSKESIDRHHERSRELLRRSRESLKDLERRLKDS

SEQ ID NO: 15124 - protein, 55 aa, Artificial Sequence
  Synthetic
RELEELEKRVRELERRIRETLTRLNEEIEKNHRRVEERLRDLNREAEKLAEEAKR

SEQ ID NO: 15125 - protein, 60 aa, Artificial Sequence
  Synthetic
SEKEDLSRRLAELLKEHHDRSKKLLDESRDSLRKHHKASRDMLRRSDESLKRLDRVRKER

SEQ ID NO: 15126 - protein, 55 aa, Artificial Sequence
  Synthetic
EELDRIRKEVKKNHDRARRALEKIDKEAKENHERVREALRKLNEDLEKLEREKRK

SEQ ID NO: 15127 - protein, 60 aa, Artificial Sequence
  Synthetic
REKEELIKRLKRLIDELRRVVKTLLADLERLLKEHHDRSRRILEESKRSLEELEKTLRRS

SEQ ID NO: 15128 - protein, 55 aa, Artificial Sequence
  Synthetic
DELRKLKEELEDLARKARKEIEDIKEKLRRNHERVKKALEDLNRTAEELLDRARQ

SEQ ID NO: 15129 - protein, 59 aa, Artificial Sequence
  Synthetic
SREEKLLKELKDIIDTLRRRVEEILTESEKSLRDHHRESRKIVEELRKLLEDLRRLLER

SEQ ID NO: 15130 - protein, 55 aa, Artificial Sequence
  Synthetic
RELDKIEEEARELVKRAEEKLREIDKRARDNHKRVRDELKRILDELKKLIDERRK

SEQ ID NO: 15131 - protein, 61 aa, Artificial Sequence
  Synthetic
SVEDSIDKIDKELEKNSERTKRTIDRIREESRRLIEEIKDRVRRLLREAERTIEDVKRKLK

SEQ ID NO: 15132 - protein, 59 aa, Artificial Sequence
  Synthetic
RRVVEELRERLKRLLEKHHDLMRRLTEDLKRLLEESERDARRLVKELEDALREIREDTR

SEQ ID NO: 15133 - protein, 59 aa, Artificial Sequence
  Synthetic
SREDKVRELEERLKRLNERLNREVKKVNEDNRRLLKRAEDTARRLAERIRRLLERVDRE

SEQ ID NO: 15134 - protein, 56 aa, Artificial Sequence
  Synthetic
DEELERRVEELLKRNEKLIREVKKRLEELLRRNEELIRRILEEVEKLLKDLEDKVR

SEQ ID NO: 15135 - protein, 60 aa, Artificial Sequence
  Synthetic
RREERVKEALERIRRLNKRINERVEEVNRENKRLLDEAKRTHEELEKEADRLLDDVRRKI

SEQ ID NO: 15136 - protein, 56 aa, Artificial Sequence
  Synthetic
EEELEKEIRKVLETNRKLAEDVRRDLERLLRRNRRLIEESKKEVEKLLKELEEDVR

SEQ ID NO: 15137 - protein, 60 aa, Artificial Sequence
  Synthetic
RRDDKVRKLEKELRDSNRKANDESKKLRDELRRLNEEANRRVRELERRIERLLEKVKDDI

SEQ ID NO: 15138 - protein, 56 aa, Artificial Sequence
  Synthetic
EEELKKRVEEALEEHRRLVEEVRRRVERILERNDELIKRIEETVEDLLRRLEEEVR

SEQ ID NO: 15139 - protein, 61 aa, Artificial Sequence
  Synthetic
SEIDEIVKEVERLLEKLKEDSRRTVEEVKKLLDELRKHSEDSVREIEELIERLRREIERDG

SEQ ID NO: 15140 - protein, 56 aa, Artificial Sequence
  Synthetic
EEKLRRLEEELREILKRSEDLARKLDEDLKRILERTRREIKRLEEDLDRLDEEVRR

SEQ ID NO: 15141 - protein, 61 aa, Artificial Sequence
  Synthetic
SESDEIIKEVDELIKRLRKHSKETVKEIEEILTRLEERSRKSVKEIEDEIRKLEDIVRKRG

SEQ ID NO: 15142 - protein, 56 aa, Artificial Sequence
  Synthetic
EEKARTLERKLDKILEETKREAEELKKRLDELVEKTRRLIEELKRRLKELLDRAET

SEQ ID NO: 15143 - protein, 61 aa, Artificial Sequence
  Synthetic
DESRKIVRDVEELIKRLEEHSRETVKRADRVLREDHKKSRDSVREIEKLIRDVKDKIDKRG

SEQ ID NO: 15144 - protein, 56 aa, Artificial Sequence
  Synthetic
EEEVRRLKKELDDLLEETKDLIRRLEEKLDKNVKETEDEIRRLIEELKKILEDATR

SEQ ID NO: 15145 - protein, 61 aa, Artificial Sequence
  Synthetic
REIDEIVKEIEKILRELKKRSDETVREIERLIEEDHRKSRKSVRDIEKLIDDLRKDVERRG

SEQ ID NO: 15146 - protein, 56 aa, Artificial Sequence
  Synthetic
EEKLRKLEEELRRLLEESKREADRLKKELRDNLKTTDELIKELKERLDKLKEDIER

SEQ ID NO: 15147 - protein, 61 aa, Artificial Sequence
  Synthetic
DESDRIVEEVRRLIKTDHDNSRRSVRKIEELIARDHKKVKEIVDEIRRLIRELEELIRRDG

SEQ ID NO: 15148 - protein, 56 aa, Artificial Sequence
  Synthetic
KEKLDRLEEEIDKNVKRTREEIERLKRELDKNLEDVRRLAKELEDELRKLDEDAKR

SEQ ID NO: 15149 - protein, 61 aa, Artificial Sequence
  Synthetic
SEIDRIIEDAERLLRELERNSDRSVEEIEKLIRDDHDNSRRTLEKIEKVIRELRKDVKDRG

SEQ ID NO: 15150 - protein, 56 aa, Artificial Sequence
  Synthetic
REKVKRLEEELRKILKKTREKAEELKRRIDRNVEETRRRARELKEELDRLLKEART

SEQ ID NO: 15151 - protein, 59 aa, Artificial Sequence
  Synthetic
DESRKVIKEIEDLLEEWKRRSERMIRESEKLIEELRERVDKILEDIDRLIRTLDELRKA

SEQ ID NO: 15152 - protein, 56 aa, Artificial Sequence
  Synthetic
EEEAKRLKDELEEILKESEDLSRRTKKELEDLLREVEKEIKKLEDKLKKLLDETDK

SEQ ID NO: 15153 - protein, 59 aa, Artificial Sequence
  Synthetic
SETEKVIREIEKLIDDIRKESERSIEESRKLLKELEEIVEKAIRDSRRLLEDLRRLVED

SEQ ID NO: 15154 - protein, 56 aa, Artificial Sequence
  Synthetic
EEKADTLRRKLEKLLEDTKRMSEKTKKEIEDLLKRVRELSEETKRRLDRILEDVER

SEQ ID NO: 15155 - protein, 59 aa, Artificial Sequence
  Synthetic
SESDKVVKEIEELLRELRKRVEEIIRESEALIETLKKRVDDAVRESRKLIKDLRELIER

SEQ ID NO: 15156 - protein, 56 aa, Artificial Sequence
  Synthetic
REKAKKLREELRKLMEEVRRLSKETKDKLDELLKTVEELSKELRERLKRLLDEAET

SEQ ID NO: 15157 - protein, 59 aa, Artificial Sequence
  Synthetic
SESDEVAKRIKELIDRLEERSRRSIRESDRLIKELEKEIEKAVRESEKLIRDLEELIRR

SEQ ID NO: 15158 - protein, 56 aa, Artificial Sequence
  Synthetic
EEKMRTLEEDLKRLLEETRDMSRKTKEKLEELLKRVRDLSKKLAEDLRRLLEEVRR

SEQ ID NO: 15159 - protein, 59 aa, Artificial Sequence
  Synthetic
SETDEVIKTLEELLERIKRRVEELVKRNKDLIKALEEEVRRIIKESKKLIDDLAELAKE

SEQ ID NO: 15160 - protein, 56 aa, Artificial Sequence
  Synthetic
KDKADRIREEIRKLEEEVKRLHDELKKELDDLLRRVEEDSKRTKERLRKLLTDVKK

SEQ ID NO: 15161 - protein, 60 aa, Artificial Sequence
  Synthetic
SEVDDLIRRLEKLLEDIKRRVEELVRRDEKITKDWERESERLIRELEELLKTIADLVRRR

SEQ ID NO: 15162 - protein, 56 aa, Artificial Sequence
  Synthetic
KKKLDEIRKRLEEILKRVRELLERLDRENEDLARKSKELADRIRKELKRILDEVRR

SEQ ID NO: 15163 - protein, 60 aa, Artificial Sequence
  Synthetic
DEVDELVKELEESLRRSREEIERLVREDEELTKTIREEVKKLVKTDEDLSKKIEDTVRRR

SEQ ID NO: 15164 - protein, 56 aa, Artificial Sequence
  Synthetic
KDKIKELKERNDKLLEEARRLAKELKERNDTLLKEVREELRRLRERNDRILKEAKK

SEQ ID NO: 15165 - protein, 60 aa, Artificial Sequence
  Synthetic
DEVDKLIRDLEELIRRIRKRLKELVDRDRELTREIRRRIRELIEESKEALERIDKRVKER

SEQ ID NO: 15166 - protein, 56 aa, Artificial Sequence
  Synthetic
KDKIKKLKDDLDRLLKEAEDRLRELEERNKRLLDEARKEIEKSDRRLEEILERVRR

SEQ ID NO: 15167 - protein, 60 aa, Artificial Sequence
  Synthetic
DEVDELIKTLKKLLEDIRERVERLVTDSKRSLDEIRETVRDLVRRDKELLKRIEDTVRER

SEQ ID NO: 15168 - protein, 56 aa, Artificial Sequence
  Synthetic
KDKLEKIKRDLEKILTEVREALRELDERLKKLAEEAKRLLEELRKRNRDILEKVRK

SEQ ID NO: 15169 - protein, 60 aa, Artificial Sequence
  Synthetic
DEVDKLIKEIEESLRRSEKEVRDLVRESERSLKEIEKRVRELVKRDEDLLKEIEEVVRKK

SEQ ID NO: 15170 - protein, 56 aa, Artificial Sequence
  Synthetic
EEKLKRLRKENKDLRDRVEEELRRLDKELDELLETVRRLLDELRKRNKKLLDEARK

SEQ ID NO: 15171 - protein, 60 aa, Artificial Sequence
  Synthetic
RLEEEIERLRREVEELIERSKDLIRRSHTKSRKLIEDVKRELDRLRREVEELIKRAEDRT

SEQ ID NO: 15172 - protein, 55 aa, Artificial Sequence
  Synthetic
DRVVREAEKLIRKIAEDNRKALEESDELIRRSEKDVRDMVRRAEELIEEIKRRVD

SEQ ID NO: 15173 - protein, 59 aa, Artificial Sequence
  Synthetic
SKDEEVERLKEELDRLLEEVRRLSEESKKRNDELLKRAEEIIEELKKELDEIREEVERR

SEQ ID NO: 15174 - protein, 56 aa, Artificial Sequence
  Synthetic
KDTVVRRAKKVIDELRKDVERVKRESDEVLKELEKLNREIEREVRKLLKELRDTVR

SEQ ID NO: 15175 - protein, 59 aa, Artificial Sequence
  Synthetic
RSEEEARKLERENKKLVDDARKLSEESRRRNDKLVEEARRIAEELKRELDRLLEEVDRR

SEQ ID NO: 15176 - protein, 56 aa, Artificial Sequence
  Synthetic
TKTVVDRVKKLLDDLREVNREILRESDKVLRDLKRLNDEIKREVEELLERLEREVR

SEQ ID NO: 15177 - protein, 59 aa, Artificial Sequence
  Synthetic
SAEEDAERMKDRNRRLLEKVRRLSEESKRRNDKLVEDAKKLSEDTRRKLEDIARKVRKR

SEQ ID NO: 15178 - protein, 56 aa, Artificial Sequence
  Synthetic
KDRVSEEIDRLLRDLERRNREILKESKEVLDRLKKLNEEILKESEDLLRRLEEEVR

SEQ ID NO: 15179 - protein, 60 aa, Artificial Sequence
  Synthetic
SEIEKVVKDVDKLLKELEDHTRKSLEDSKRLLDELRKHTEDTSREVKELLERLEEVIRRN

SEQ ID NO: 15180 - protein, 56 aa, Artificial Sequence
  Synthetic
KEDADRLRERLDRILEESERLSRETKEELDRLLEDSKRKIRELEERLKKLLDDAER

SEQ ID NO: 15181 - protein, 60 aa, Artificial Sequence
  Synthetic
DDSDKVLKELEKLLEDLERHTRESLRESDELLKELKEHTKTTLRRSERLLRELKRLVDEN

SEQ ID NO: 15182 - protein, 56 aa, Artificial Sequence
  Synthetic
EKDVEEVRRKVEELLKDSERLSKETKERLRDILRDSRRLSRETKEELKRILKEVRD

SEQ ID NO: 15183 - protein, 60 aa, Artificial Sequence
  Synthetic
RESEEVIKEVEKLLEELKENTKRTLKESRDLLKTLEDHTRETKKTVEKMLKELEDKVRKR

SEQ ID NO: 15184 - protein, 56 aa, Artificial Sequence
  Synthetic
EEEADRLRRELKKILDRSRELSRKTKEDLKKLLKESEDIIRELDRRLEEILKEVER

SEQ ID NO: 15185 - protein, 60 aa, Artificial Sequence
  Synthetic
EEIERVIKEVKDLIEELRRNTERTLRESEELLKTLKKISDDSKEEVERMLRELRELVKSN

SEQ ID NO: 15186 - protein, 56 aa, Artificial Sequence
  Synthetic
KEDADRLRREVDKLLEESKRLSEETKRELDRILEETKRTLERLKEELDKILEEVER

SEQ ID NO: 15187 - protein, 60 aa, Artificial Sequence
  Synthetic
SEKEKLVEEVRRIIERHKRVTEELLKELRRILKEWEDVSRDIERRVREILERLERAARDG

SEQ ID NO: 15188 - protein, 55 aa, Artificial Sequence
  Synthetic
KDLEELKKELEDSARRSKKLADDVREELKTLLRESERIIKELRKELEKLLREVEK

SEQ ID NO: 15189 - protein, 60 aa, Artificial Sequence
  Synthetic
TLEEVLKEVKRRVERVNEEDKRVLDESRKRAKEINDEDRRLLEESKRKAEELLERLRRKD

SEQ ID NO: 15190 - protein, 56 aa, Artificial Sequence
  Synthetic
EDRLRREAERILREIRELSRELKRKNEELLRTIRRVSEELRKKNEEILERVDREIK

SEQ ID NO: 15191 - protein, 60 aa, Artificial Sequence
  Synthetic
SAKELLDDLRKKIEDNVRETEKLLRRLREKVEKIEREIKELVRKLREDLERLLEKVKRRG

SEQ ID NO: 15192 - protein, 55 aa, Artificial Sequence
  Synthetic
KEVVDTVRELIERDHKKSRDSVRRVDELIDRARKDVRRVVEEVRKDLEKLDEDVK

SEQ ID NO: 15193 - protein, 59 aa, Artificial Sequence
  Synthetic
REVEEVLKDLKRLIDEAKKRVEDAIREIDRLIREWERLNREMLREIKKSNDEVRELVKA

SEQ ID NO: 15194 - protein, 56 aa, Artificial Sequence
  Synthetic
EEAVRDVERRLEKLLKEIKDLIDRLKEKVDRVKREVERSIEELKRHNEEVLKEVRK

SEQ ID NO: 15195 - protein, 59 aa, Artificial Sequence
  Synthetic
KEVEDVLEELDRLIETWARLNRELVERIRRLLEEWREENRKVVEEVRRSNETLRELVER

SEQ ID NO: 15196 - protein, 56 aa, Artificial Sequence
  Synthetic
EEVVRRVKDKLREVKREVEETARELRERVDDLLRKVEESVTRLKRHNEDLLREVER

SEQ ID NO: 15197 - protein, 59 aa, Artificial Sequence
  Synthetic
SEVEEVLRDLKRLLEEWKKRNEDLVRDVERLLREWKEANDRALKKSRDSNKELERLARD

SEQ ID NO: 15198 - protein, 56 aa, Artificial Sequence
  Synthetic
KEMVERVRREIKRLEEEVKKTITDLKERLKKLKEDADRSSRESEEHNKKVVEDVRR

SEQ ID NO: 15199 - protein, 59 aa, Artificial Sequence
  Synthetic
REVEEVLKELDRLIDELRKEVEKIVREVERSNDEWRRRNKELVDEVRRELDRLRKLVDD

SEQ ID NO: 15200 - protein, 56 aa, Artificial Sequence
  Synthetic
KEVVDDVKRKLEDLKRRVDELVRRLEEHNKDLRRKVEESAKDLRRKLEELRERVER

SEQ ID NO: 15201 - protein, 60 aa, Artificial Sequence
  Synthetic
SEKDEVRKTIERLLKEVEKMIRRVLKEVEDLLRELKKRTEKLKRELDESHRRVKEVIERR

SEQ ID NO: 15202 - protein, 56 aa, Artificial Sequence
  Synthetic
RELLEEVERALKKLKEDVDKVIEELREKLKRHHEDVKRAIDRVREESKRLKDEAEK

SEQ ID NO: 15203 - protein, 60 aa, Artificial Sequence
  Synthetic
REDEEVVKTLRELLREAKERTDRLLRELREIIKTMRKRLRDIEEDLRRSHREIEKLIRDR

SEQ ID NO: 15204 - protein, 56 aa, Artificial Sequence
  Synthetic
RELLEEVRKELERHHREARRAVEEVKKLIDDLMREVRKLIDEVRKDSERLRREVER

SEQ ID NO: 15205 - protein, 60 aa, Artificial Sequence
  Synthetic
DEDEEVKRRLEKLLEDADRVTEKIRKDLKETHDRVKRAIDELKKELEKSHRTIKEVIERR

SEQ ID NO: 15206 - protein, 56 aa, Artificial Sequence
  Synthetic
RELVEEVRDRLRKHHKKVRDIVDDVDKRSKDLERTARRVIEDVKEKSDRLKEEVDR

SEQ ID NO: 15207 - protein, 56 aa, Artificial Sequence
  Synthetic
EDEERVKEKLKRLLEKAEEALRRSKRRNEENKKEHERVLKEIDERLKRLEEKVRRG

SEQ ID NO: 15208 - protein, 56 aa, Artificial Sequence
  Synthetic
REDIERLLKELDDRIRRIIEELKRSDEELHKENRRKIKELEDLVREADKRIEDKRK

SEQ ID NO: 15209 - protein, 56 aa, Artificial Sequence
  Synthetic
DDEKEIKDRLDDNKRKDDEMTKRAEDELRKNLETTKEALRDIKRKLDRLREKVERN

SEQ ID NO: 15210 - protein, 56 aa, Artificial Sequence
  Synthetic
REELEKIVRDLHKRNKEVIDDIRRLIDELHKRDRETIKRLEEIVRRADEKIKEKAR

SEQ ID NO: 15211 - protein, 56 aa, Artificial Sequence
  Synthetic
SDEERIEERLKRNEETDKRATDENEKRNDDLLRRAKEALDRNRERNDELRDKVRKE

SEQ ID NO: 15212 - protein, 56 aa, Artificial Sequence
  Synthetic
REELSKLVKELHDDNREKIKDSDRSDDDIRREIERMIRETNKSDEDIARAIDESAR

SEQ ID NO: 15213 - protein, 57 aa, Artificial Sequence
  Synthetic
SERERVEERLKELAKRVEDAIRRLKKDLERTKEEHKEADRRVKEKLKRLKEEVDRAN

SEQ ID NO: 15214 - protein, 56 aa, Artificial Sequence
  Synthetic
DTEVEELLKDVKRKIEEMIKELKRLNDELNKRSEEMIRRNDDLIKRLEEEIRKDSK

SEQ ID NO: 15215 - protein, 59 aa, Artificial Sequence
  Synthetic
SSEDEVRKTVDELRERSERTIRDLERVDRELKKEHEELIKELREIVKELREKVKRASKE

SEQ ID NO: 15216 - protein, 55 aa, Artificial Sequence
  Synthetic
KRIEEELRKLHKENKEAVERSERTNRDILRRNDEADKEIEKELRELIEKLERDRK

SEQ ID NO: 15217 - protein, 57 aa, Artificial Sequence
  Synthetic
SEKEDLKEKLKRNEEEHRRAVEEIRKRLDENRRRHEKVIKEIEDALKKDEDDVDKEN

SEQ ID NO: 15218 - protein, 56 aa, Artificial Sequence
  Synthetic
KDELTREIEKLHRTNREMVRDLRETLKRLHEENKRLVDELRRLLEELHRRTREASR

SEQ ID NO: 15219 - protein, 57 aa, Artificial Sequence
  Synthetic
SEEEEVRKALERLRRELKRVLERSEELLKEWEDRLRRVLEESRRLLERWREELEKDG

SEQ ID NO: 15220 - protein, 56 aa, Artificial Sequence
  Synthetic
REELKEILKRLEDTLREIEKEAKRLNDELARVLEEIRRKSERENRRLKELIDRLRK

SEQ ID NO: 15221 - protein, 57 aa, Artificial Sequence
  Synthetic
SDRERLEEMLKRLKEELEKVRRDNERSLEEIKRSVDRVLEEHKRTLEELKREVDRAN

SEQ ID NO: 15222 - protein, 56 aa, Artificial Sequence
  Synthetic
GEEADEVVKRLADVLEKAREDLKRSDKRLRDSNRESRKELEKINRDLRRKLEEAKR

SEQ ID NO: 15223 - protein, 57 aa, Artificial Sequence
  Synthetic
KDEERLETVLREIETRAEKVARDHRDSLRRIREELERVLKENKDTLKRIREELEKTN

SEQ ID NO: 15224 - protein, 55 aa, Artificial Sequence
  Synthetic
EEVKRVLKELRDLLEEIRKRLEDINRDLKRKLDEIEEELRRSDEKLKRDLEEARK

SEQ ID NO: 15225 - protein, 56 aa, Artificial Sequence
  Synthetic
SDEDKLREDLRRLEEELKKVLDDHRKSLKEIEDSLRRVLEENKRTLEKLKRDAEKA

SEQ ID NO: 15226 - protein, 56 aa, Artificial Sequence
  Synthetic
GEEAKKVVKALEDVLREIRERLKRINDELRERNKKSSDELRKSDERLKRELDKMRK

SEQ ID NO: 15227 - protein, 59 aa, Artificial Sequence
  Synthetic
DADKELEKLLREWEKRSEELRKRLEDINRRWEEESKRLKKELKDINADLRRKVEELRRD

SEQ ID NO: 15228 - protein, 59 aa, Artificial Sequence
  Synthetic
SDVIRRAKEELDRIEKKDRDVLDDNRRLIETWRREDKKVNDDNRRSNEELKRELDKTRE

SEQ ID NO: 15229 - protein, 59 aa, Artificial Sequence
  Synthetic
SAEEELKELLERWDRDSKRAEEELRRLLEESRERSEKVLRDLKRLLDEMEDAVRKLKRD

SEQ ID NO: 15230 - protein, 59 aa, Artificial Sequence
  Synthetic
SEVIERFKDVLRRIEKRNKEVIDRAKEVIDEDEKRNREVIERVERKVERLRKEVEDREK

SEQ ID NO: 15231 - protein, 63 aa, Artificial Sequence
  Synthetic
EEKERMREVLKRLEEEAKKVLDDNRRAVEEIEKKDREVHKRNRDLLERWREEMEEILRKARER

SEQ ID NO: 15232 - protein, 56 aa, Artificial Sequence
  Synthetic
EEELKKIIERAREELEKVRRELEEHLKRWDEISKKLSKDLERHNEEVARTLKRSRD

SEQ ID NO: 15233 - protein, 60 aa, Artificial Sequence
  Synthetic
SVLEEFKKRIEELHRRDRKVLEDHRRRLKEWEEELKRVLDEHRESLKRIKERVDRVKKDL

SEQ ID NO: 15234 - protein, 56 aa, Artificial Sequence
  Synthetic
SDALRELLREWDKLSKELEKELRDLNREVERSIREAKKKLEKANEEMRRTLEKDRK

SEQ ID NO: 15235 - protein, 60 aa, Artificial Sequence
  Synthetic
STEEDAERALEELKEELRRVEKENRDSLKRIREKLKEVEDEHRKTLEELKKELDDVMRKI

SEQ ID NO: 15236 - protein, 56 aa, Artificial Sequence
  Synthetic
KDSLKRLLDEARKKLEELKRRLEKLDRDLDESLKRLKEDLDRLDRELRRLLDELDK

SEQ ID NO: 15237 - protein, 60 aa, Artificial Sequence
  Synthetic
SVEEEARKALDDLRRRLEEVTRRHRESLKELREELDEVRKENEKSLKKIKDDLEAVRRRI

SEQ ID NO: 15238 - protein, 56 aa, Artificial Sequence
  Synthetic
EEELRRLLKKLEDDLRRLKKRLDELDRRLRELVKRLLEDLKRLDDELKKLLEETER

SEQ ID NO: 15239 - protein, 57 aa, Artificial Sequence
  Synthetic
SAEEELKRLLEEHKKESEDVKRRLRDLLRELEDIHRRMTERLRELLKRLDDILRRRN

SEQ ID NO: 15240 - protein, 55 aa, Artificial Sequence
  Synthetic
EEILKKLEEISRRVREKVKKELDELKELIRRHARKLEKILEEIRRLIEDLERRAR

SEQ ID NO: 15241 - protein, 61 aa, Artificial Sequence
  Synthetic
SEAEEVLKRIRDILETLRREHERILKEIRELNEEFKKEVEKALRKIKRELEELEKDAEREG

SEQ ID NO: 15242 - protein, 59 aa, Artificial Sequence
  Synthetic
ERVEKKIEELLREIRKVNDEVHKRIRKLLEDHRRTVDEARRRIEELLRRLKKTLDDIDK

SEQ ID NO: 15243 - protein, 57 aa, Artificial Sequence
  Synthetic
SDKDELKRLLDDHERTSTRARESLEKLSREHRKTSREVEERLKRLVDAIRDTARRVD

SEQ ID NO: 15244 - protein, 59 aa, Artificial Sequence
  Synthetic
EEVVRRILRELRELNERAKEMLERILRKLEELNREYKKKVREILERIKELLRDLRRKAN

SEQ ID NO: 15245 - protein, 61 aa, Artificial Sequence
  Synthetic
SADDEIRKLKKEAEDILRKAREDRERLKEKNRKIDEDMRRTLKKLHEETRELEKKVRREKG

SEQ ID NO: 15246 - protein, 55 aa, Artificial Sequence
  Synthetic
EELVKEIRELLRRLEEKIEELRRRYEKKLEELKRKVDELIRRYKRKLERVAEEVK

SEQ ID NO: 15247 - protein, 60 aa, Artificial Sequence
  Synthetic
SEEEELVRRVEEKIKASEKHARELVEETRKKLDESRKKWKDLARRSRRLLEELKDKVDKG

SEQ ID NO: 15248 - protein, 55 aa, Artificial Sequence
  Synthetic
EELRRLEKELRDLNKRVKEESRKLEEDLKDIHERAKEDSKRLKRELEKIKEEVER

SEQ ID NO: 15249 - protein, 59 aa, Artificial Sequence
  Synthetic
DAERILRELEERLKRLLDEHREISKELRKRNKDLLKEHKERSKRVKEELKELVKEVEDG

SEQ ID NO: 15250 - protein, 56 aa, Artificial Sequence
  Synthetic
IEELVKEVEKLIKELREKSREVEREVDKMIRDNARKSEKIVRDAKRLLEKLEREVR

SEQ ID NO: 15251 - protein, 59 aa, Artificial Sequence
  Synthetic
RSEDILRELRERVKRSEERHEKISRDLERKNRELLKEHRERSEKLKRELEELVKRVEDR

SEQ ID NO: 15252 - protein, 56 aa, Artificial Sequence
  Synthetic
AEDLARRVDETIKDHERHSEEVKRDVTEKIKENEKLSRDIVRRVEKLLRDLEREVR

SEQ ID NO: 15253 - protein, 59 aa, Artificial Sequence
  Synthetic
SREDILRDLRRRLEELLRRHKRISDELRKRNKKLLDDAEKRAKELREELEKLVREAERR

SEQ ID NO: 15254 - protein, 56 aa, Artificial Sequence
  Synthetic
IEELVKRVDKLIKELKRKSEEVMKRVDELIRRNERLIREIVKEVEKLLEDLEREVR

SEQ ID NO: 15255 - protein, 59 aa, Artificial Sequence
  Synthetic
SAEETIERLKEEIEKLLREAEEILRRLRERNRRLLEEHKDISRKLEEELRKLMEKVRRG

SEQ ID NO: 15256 - protein, 56 aa, Artificial Sequence
  Synthetic
VEELVRRVRELIKRLRDMAKEIEERVDETIRRNRRLSEKVARDVERLLRELEERVR

SEQ ID NO: 15257 - protein, 59 aa, Artificial Sequence
  Synthetic
DAERILKELEERLDRLSEEAKKILDELRRENEELLREHDERVKKLKEDLKRLEKKVEDG

SEQ ID NO: 15258 - protein, 56 aa, Artificial Sequence
  Synthetic
VEELVKRVTKLIEDLRRLAKKISDEVRKLIEENRRASKRVEDEARELLKRLEDAVR

SEQ ID NO: 15259 - protein, 56 aa, Artificial Sequence
  Synthetic
SEIEKMVKDVRDLLKRLKDEVKKISERWEDSLRKLKKRSEDTVKRVKEILEELRRR

SEQ ID NO: 15260 - protein, 56 aa, Artificial Sequence
  Synthetic
RDALRELERELDKLRKEIKKELDRLRKENREVNERHKELSKRLEEELERVKRELDT

SEQ ID NO: 15261 - protein, 57 aa, Artificial Sequence
  Synthetic
DEVRELVKTVKKVLDDIRREVEETLRRYEKLVEDLKRRSDKSVKDVDDEIKRAEEEG

SEQ ID NO: 15262 - protein, 56 aa, Artificial Sequence
  Synthetic
EELIKRLREEAEKLIRRAKEEHERLEEESKRLLEENEELLDRLDKKVRTLLDKLEK

SEQ ID NO: 15263 - protein, 60 aa, Artificial Sequence
  Synthetic
SEEDRVRETVKKLLEDHRRKTEKVTEDVRRLLKENREKVEDAVDKARKLLKRLEELRREG

SEQ ID NO: 15264 - protein, 55 aa, Artificial Sequence
  Synthetic
EKLKRIEEELRKSRERTKRLLEEIRKELEDSKKEVEDLLRRLREELKRLKDEIER

SEQ ID NO: 15265 - protein, 63 aa, Artificial Sequence
  Synthetic
SEVEELVKRAEELIRELKKLSEDSVRELEKLLDEYRKTTEKLKRELEELLKEVEDVVRKLRDQ

SEQ ID NO: 15266 - protein, 56 aa, Artificial Sequence
  Synthetic
EKLLRKIEEDVRRLKETNERLLKRVDEELKRLDEESRRVLKEAKERLKELKDRERK

SEQ ID NO: 15267 - protein, 57 aa, Artificial Sequence
  Synthetic
DEVEKVLDELEKVIREVEERIKTTNKRLREVVERVERRIDKSDRELEEMIERVERKL

SEQ ID NO: 15268 - protein, 56 aa, Artificial Sequence
  Synthetic
SEEVRKEVRRLDKRVKEIVEESRKLVKELAERVEEIVEESKRLVEKLAREVDETRR

SEQ ID NO: 15269 - protein, 57 aa, Artificial Sequence
  Synthetic
SEIEKALKEAREAIEDAKKKIDDTDRENEKASRDAERRIDKSDKEAEEAVRRAEEEA

SEQ ID NO: 15270 - protein, 56 aa, Artificial Sequence
  Synthetic
KDEVTKAARKAADDAREAAERSRKLAEENARRAKKAADDSRKLARELAKEAKKAAD

SEQ ID NO: 15271 - protein, 57 aa, Artificial Sequence
  Synthetic
KELEDVLDTVRRAIERVKRESKKINDELEKELKKVKDELDKSHEEVRRAVEDVARKL

SEQ ID NO: 15272 - protein, 56 aa, Artificial Sequence
  Synthetic
VKDIEKLVRDVVRRAEKVVDDDRKLVRDIVRDAKRVVRDSERTVRDIVKKADENTK

SEQ ID NO: 15273 - protein, 57 aa, Artificial Sequence
  Synthetic
SKLEKILKDLERAVREVARELERTHRELEEAVKKVKKRLEDTNRRLTEALKRVKDKL

SEQ ID NO: 15274 - protein, 56 aa, Artificial Sequence
  Synthetic
VSEIKKLVDDIVRRLRKVVKDSEREVREIMKRADDVVRTSEKTVEDIVKEAEDDAR

SEQ ID NO: 15275 - protein, 57 aa, Artificial Sequence
  Synthetic
SELEEAAKRAREAAKKAKEALKRSLKEAEDAAREAEEDLKRSNDKNRKATREAEERA

SEQ ID NO: 15276 - protein, 56 aa, Artificial Sequence
  Synthetic
AEEAKKAADDLARKAKEAADESKRLSEELAKKAKEAAKTSDKLAKENAEEAKKAAK

SEQ ID NO: 15277 - protein, 57 aa, Artificial Sequence
  Synthetic
DELERVLEDLKRVMEEVERKLRESNKELEKAVRRVEELLKRSNEKNRKVTREVREKA

SEQ ID NO: 15278 - protein, 56 aa, Artificial Sequence
  Synthetic
AKDVEDLVRRLMEKLERIVEESERLSDELRRRAEEVVKTSEDLVRENAKRVDDAAK

SEQ ID NO: 15279 - protein, 57 aa, Artificial Sequence
  Synthetic
DELEEIEKKLRDVVREVEEKLRETNRRLREVVKRVEERLKKSNEDLRRAVRKVEESV

SEQ ID NO: 15280 - protein, 56 aa, Artificial Sequence
  Synthetic
AKDVEKLVKELMEEAEKIVEESRERVDRLMKRLDDIVRESERLSKELADRADEVEK

SEQ ID NO: 15281 - protein, 58 aa, Artificial Sequence
  Synthetic
RELEEILRTLEEMIERVKEKHERSKRELEKVITEVKEELRRSNEELRRVIEEVERKLG

SEQ ID NO: 15282 - protein, 56 aa, Artificial Sequence
  Synthetic
VDEVRKVVEDIVREAEKSVRENEELVKAIMRELKRVVKEAEELSEEIVRRLEERTR

SEQ ID NO: 15283 - protein, 61 aa, Artificial Sequence
  Synthetic
KELEDVKRRLEKVHRDVNEASKEIVTRLREVHKRANDESKKIIERLDTVLREVARRLADRR

SEQ ID NO: 15284 - protein, 56 aa, Artificial Sequence
  Synthetic
AEEVERRVRELEKDVRRLVEDIRRLVEELMRNAKEIVDTAEKLVRELERKLEEVVR

SEQ ID NO: 15285 - protein, 61 aa, Artificial Sequence
  Synthetic
DEVEDIIRRLEKFHREVNEESKRIIEELERVHREVNRKSEEIVRKLEKVLDEVREKAKRRS

SEQ ID NO: 15286 - protein, 56 aa, Artificial Sequence
  Synthetic
AEEVEEVVRRLVRHAEAVVERIERLVEELVRNAEKLVEEVKRKADRLVEEADRTVR

SEQ ID NO: 15287 - protein, 57 aa, Artificial Sequence
  Synthetic
DELEEVKRRLDEVNKRVEDEHRRVEEELRKVLEDVAREHEEVIKELERVLEKVRRAK

SEQ ID NO: 15288 - protein, 56 aa, Artificial Sequence
  Synthetic
SDEARKLVKENERRVEETVRRSEKLVRDAMKKAKDTVRRSAELVKELMDRVERVVR

SEQ ID NO: 15289 - protein, 57 aa, Artificial Sequence
  Synthetic
SEVEKVKKEAREMLKRVTDLLKEVNDRLKEVNKRVREEIRRVIERVREVLKRVAREV

SEQ ID NO: 15290 - protein, 56 aa, Artificial Sequence
  Synthetic
LEDLRRVVEELEKRARDVVEESRRLVDEDRKHVEDVVRRVRDVVRELEERAERITR

SEQ ID NO: 15291 - protein, 59 aa, Artificial Sequence
  Synthetic
SEVEKVVEENKKSVKTVRERVTELVKRNRDSVEEVKRRAEEMVRRNRKSVEEVRELLAR

SEQ ID NO: 15292 - protein, 59 aa, Artificial Sequence
  Synthetic
EEAKRRVDRVSEELEEVLRRVEEELRRVSKDLRRVLDEVKKEVDRVSEDLERVLRKDTT

SEQ ID NO: 15293 - protein, 60 aa, Artificial Sequence
  Synthetic
DEVDEIVRRIEEIVRESEEMAERIVRDIKRVVEKSRKDVEDNVDELRKIVEKVEETAKRT

SEQ ID NO: 15294 - protein, 59 aa, Artificial Sequence
  Synthetic
RDAERKVRDLLRDLERVNTEADEKSKKLIKELEKVNKEAEDKSRKLIKELEDVLREARR

SEQ ID NO: 15295 - protein, 60 aa, Artificial Sequence
  Synthetic
SSVDEIVKEAEKVVEDSREEAREIVERAEEIVRDSARKVDENVRRLEEIVRKVKEVADRT

SEQ ID NO: 15296 - protein, 59 aa, Artificial Sequence
  Synthetic
RDAERKVREVIERLKKVNDEVRKKLDELTRRLEDVNRKANERSTDLVRKLRRVLEEARR

SEQ ID NO: 15297 - protein, 59 aa, Artificial Sequence
  Synthetic
SADRKIEEMRKEIKRSTDEARRLVEELIRKIERSNEKVKRDVEKLIEDIRRVIRRVRED

SEQ ID NO: 15298 - protein, 55 aa, Artificial Sequence
  Synthetic
EELKKKLEDIVREDEKLVEELTRLAEDIVRRDTKLVRELLERAKRVVDRVREEVK

SEQ ID NO: 15299 - protein, 60 aa, Artificial Sequence
  Synthetic
DAEELVRELEERIKRSHERLEELLREVKRLIERSHEELKRLNEEVLRELDRVLDEVRKRK

SEQ ID NO: 15300 - protein, 55 aa, Artificial Sequence
  Synthetic
KDVVRELERIVKENSELAERVFREVEKIVRENTKLAEDSVRELKRLVEELKKRVK

SEQ ID NO: 15301 - protein, 59 aa, Artificial Sequence
  Synthetic
SDVEDVVRKLRELVKTNLKKVEDRVRKLKEEVEENVRRAEKIVRELEEEVERLLKLVAD

SEQ ID NO: 15302 - protein, 56 aa, Artificial Sequence
  Synthetic
REVAEEVERRLERSHRESRKLADEVRRALEKSNRKTRELLRRVDERVEEVREELDR

SEQ ID NO: 15303 - protein, 59 aa, Artificial Sequence
  Synthetic
SMEELVDKVEKELEESSRRSKELLDEVRRLLEESNKKTEDLLREVEELLKDVEREAEEK

SEQ ID NO: 15304 - protein, 53 aa, Artificial Sequence
  Synthetic
VVRDVERLVEENRERVKRIADEMRKLVKENEDRARDVVRRLRELVKRLRERVE

SEQ ID NO: 15305 - protein, 59 aa, Artificial Sequence
  Synthetic
KELEDIARDLERLLRENKKLIKEIVDRLRRLLEDNTRKVKKIVDEVKKLLDDLDKLRKD

SEQ ID NO: 15306 - protein, 56 aa, Artificial Sequence
  Synthetic
KEVADKVREDLERSNDEMRRVIEKIREDLRRSLKEAKERLDEIKERIDRLLDAARK

SEQ ID NO: 15307 - protein, 60 aa, Artificial Sequence
  Synthetic
KLEELLTEVRRRIEEVSRDLERVLREVEEDIKRTSDELDRVNRKVETEIKEVTERAEEKG

SEQ ID NO: 15308 - protein, 59 aa, Artificial Sequence
  Synthetic
EELVREVIERLKELVKKDKKLVEDVLRELKRLVDEDRKLVEDSLRRAKEIVDRARERVK

SEQ ID NO: 15309 - protein, 60 aa, Artificial Sequence
  Synthetic
SIEDVLREVERLLREVIERNRKVHEEVNERSREVERELKRVHDEANRESEEVIREAKRKG

SEQ ID NO: 15310 - protein, 56 aa, Artificial Sequence
  Synthetic
VEELERRAREIVKRVRELVDTHRENLERIVERAKELIKELEENLRDIVREIRERVR

SEQ ID NO: 15311 - protein, 58 aa, Artificial Sequence
  Synthetic
KEVEEVADRSRRVVEESKRRLDDVVRRVKEDSDRLRRDIERMVKRIKEIVKRVREEIG

SEQ ID NO: 15312 - protein, 56 aa, Artificial Sequence
  Synthetic
RKILKELLDRDRKSVKESEDEVKRLLDSNHELSRRIREELKRLLEKVKELVDRVRT

SEQ ID NO: 15313 - protein, 58 aa, Artificial Sequence
  Synthetic
KEVEDVKRKLEKIARDSEEALRRVVDELRKIVTESKKKLDKAVKEVKDDSKRVEETIG

SEQ ID NO: 15314 - protein, 56 aa, Artificial Sequence
  Synthetic
RDIMRKLLEEVKRSIDESKKRVKELVDEVRDSVRRSEEEVERLLRSNHRLSDEVRK

SEQ ID NO: 15315 - protein, 58 aa, Artificial Sequence
  Synthetic
DDVERVIEEVKRVVDDSKRRAEEVVEESRKIVTDSERKVREMVRDVRRIVKEVEERIG

SEQ ID NO: 15316 - protein, 56 aa, Artificial Sequence
  Synthetic
RRIVKKLLEDVRKSVKESKDTVDKLVEENKRSVDRSLRELEKLLKEVEDLIREVTR

SEQ ID NO: 15317 - protein, 58 aa, Artificial Sequence
  Synthetic
DEVDEVVKRSRDVVTESEKRLRDVVRRSKEIAEDSRRRVREVVERLKEIVREVEERIG

SEQ ID NO: 15318 - protein, 56 aa, Artificial Sequence
  Synthetic
RRVVEELLRRDEKSVEDSLRRVEKLVEDNRKTSEDIEREVRRLEEEVRKLVEDVTK

SEQ ID NO: 15319 - protein, 58 aa, Artificial Sequence
  Synthetic
REVDEVVERMKELVATVKRENDEVVKELKKLVKELEDDNRRVVEESKKSVEDLARRVG

SEQ ID NO: 15320 - protein, 56 aa, Artificial Sequence
  Synthetic
RDLVREVEKRVRDIVEESRKLAEETRKKVEDIIEKSKRIAEDTLEKNKEMVERLER

SEQ ID NO: 15321 - protein, 59 aa, Artificial Sequence
  Synthetic
REDELVERLVDKVRRSSKEVRDRAEEMVRRNEKLVRDVEEDLDRLVEENKKLVDSVSRL

SEQ ID NO: 15322 - protein, 55 aa, Artificial Sequence
  Synthetic
KEVVDRLRELVERSEKDVRKVVEEDKRITDKLEKRVREVVKRNEEITDELRERVR

SEQ ID NO: 15323 - protein, 60 aa, Artificial Sequence
  Synthetic
SSIERVAKLVEEVERHVRKSIKDVEKLVRDVERHIEESVKTVSKLVEDVKRAVEELRRKV

SEQ ID NO: 15324 - protein, 62 aa, Artificial Sequence
  Synthetic
EDVERLVREVVKRLEEIVERSERLVREVEERLKEIVERSRRLSKENEDELRKIEKEVRDRVK

SEQ ID NO: 15325 - protein, 55 aa, Artificial Sequence
  Synthetic
KDVEDAERRLKELLDRLKRFVEESVKTSKKIVDDSKRVVEESAKRSRDIVREVKD

SEQ ID NO: 15326 - protein, 56 aa, Artificial Sequence
  Synthetic
REKIEELVKEVDKLIKDVVRRMEKLNREVKKSADDSAREVEELNRRVREVVERVRT

SEQ ID NO: 15327 - protein, 57 aa, Artificial Sequence
  Synthetic
DEVEEVEKELRELVKRSEEVAREVKDRLRKLVEESERVVRESRRKSREIVEEIRKKV

SEQ ID NO: 15328 - protein, 56 aa, Artificial Sequence
  Synthetic
KDEARRLVEEVKRSVEKSVKELEDLVEEVKRSVEESVKEAKELNDRVDETVKRRAT

SEQ ID NO: 15329 - protein, 57 aa, Artificial Sequence
  Synthetic
RSVDEVEKELRELVERITRFVEKSVRDSRKIVEDSKREVEKVKDDLRKIVEEIRRKV

SEQ ID NO: 15330 - protein, 56 aa, Artificial Sequence
  Synthetic
EEDAKRLVKEVAELIKRVVEEMKKLNDEVEESARRSVEEARRLVEEVKRLVDEVAT

SEQ ID NO: 15331 - protein, 59 aa, Artificial Sequence
  Synthetic
EVEELVERVLRELERLVRENKESSDRIKEELRKLVEDNEKSVRDTKRTAEKLVDDLRRK

SEQ ID NO: 15332 - protein, 59 aa, Artificial Sequence
  Synthetic
ERVVRKVREDVKRVERLSKEIVDDSKREVEKVVETSRRIAEKSTDVVRRVKRELEEITR

SEQ ID NO: 15333 - protein, 59 aa, Artificial Sequence
  Synthetic
SMKELIKRVKDLVDEVRKKVERLIEEVSKLVDDVKRHIRELIETVKRLVKEVADLLRAG

SEQ ID NO: 15334 - protein, 59 aa, Artificial Sequence
  Synthetic
EEARRLVEKVERDLKDIVRRVEELSRRNVERLKEIVKESRELVKEVVERLKRIAEEVTT

SEQ ID NO: 15335 - protein, 56 aa, Artificial Sequence
  Synthetic
KEKEDVKRRLEELIRRLEEHSKKVKRDLERVIKELDDEVRRVKERHEDVIRRLKDR

SEQ ID NO: 15336 - protein, 55 aa, Artificial Sequence
  Synthetic
DDVVRRVKELLRRVLEHTRKVVEDVRRLLKRIREKLEEISRKLDELLRRIEEKRR

SEQ ID NO: 15337 - protein, 58 aa, Artificial Sequence
  Synthetic
DREDEVRKDIERIERELRRVVDELRKEVEDSMRKLDEEVKRLEEHIRESVERLEERVS

SEQ ID NO: 15338 - protein, 55 aa, Artificial Sequence
  Synthetic
EKVLRDLKRVVDEVRKELKDVLDRHNKVVREVERKLEEVIDKHRKAVEKVKRDAK

SEQ ID NO: 15339 - protein, 59 aa, Artificial Sequence
  Synthetic
SREEELKKEVERLVREAEKHVEDNRKHVEDSVRELEKLVKELADKARESADRLDKKVKE

SEQ ID NO: 15340 - protein, 55 aa, Artificial Sequence
  Synthetic
ERVLEELKRVVDDIRKKHKDILKRHRDVVRKVEKELRDILREHNEVIREVKDKLE

SEQ ID NO: 15341 - protein, 60 aa, Artificial Sequence
  Synthetic
SEVERILKEAKRRLDEVVERLRKSAETLRRMLERVSRELKKSHDELDRVLRRVEDALRKR

SEQ ID NO: 15342 - protein, 56 aa, Artificial Sequence
  Synthetic
AEELRKEVEDMVRDLERLVREHSDRVRKIVTDLDRLVKEHNEEVRKIVERLDEEVK

SEQ ID NO: 15343 - protein, 60 aa, Artificial Sequence
  Synthetic
SELDEILERLKEVLERVKRKLEESNRRLEEVLDRVLKKLTESVKRLEDELRRVLKELREN

SEQ ID NO: 15344 - protein, 56 aa, Artificial Sequence
  Synthetic
IEEIKKDVERIVRELEDLVRRHEKRVEDIVRELEKIVRDHNERLKEIVRRAEEDVR

SEQ ID NO: 15345 - protein, 60 aa, Artificial Sequence
  Synthetic
RELEEILKRLEEVLERVLRELRKSVERLRKELERVLKELRDSNRKLDKVLREVLEELRKK

SEQ ID NO: 15346 - protein, 56 aa, Artificial Sequence
  Synthetic
AEDLERRVKEIERRLKRLVDEHNRRLREIVRELEEIVKRHKERVEEIVRELKRRVD

SEQ ID NO: 15347 - protein, 60 aa, Artificial Sequence
  Synthetic
SELDDIVRRLDEMLKRVEDELRKSDERLDELLKRVKKELEKSNRDLERALREVLKELEDR

SEQ ID NO: 15348 - protein, 56 aa, Artificial Sequence
  Synthetic
ARELEEEVERIVRELEKLVEEHKEELERLARKLEEIVRRHEERVRRIVKELEDRVK

SEQ ID NO: 15349 - protein, 60 aa, Artificial Sequence
  Synthetic
RELDEILRRLREELKRVREELEKSLKRLEDELRKVEEDLRESNERLERMLERVLRELRKR

SEQ ID NO: 15350 - protein, 56 aa, Artificial Sequence
  Synthetic
VDELRKELEKIAREAREYVKRNKDDLRRIVEELRKIVKKHKDKVEEDVRRLKKDVD

SEQ ID NO: 15351 - protein, 56 aa, Artificial Sequence
  Synthetic
RELEEILKKLEEVVRTVEELHKRTNEKLEKAVDEVRELHRKTNEDLKRAVDEVEKA

SEQ ID NO: 15352 - protein, 56 aa, Artificial Sequence
  Synthetic
KDRLDEEVKRLVEEARRSVEDDDRNIRRLVEEAKDSVRRDEETIKKLVDELREATR

SEQ ID NO: 15353 - protein, 56 aa, Artificial Sequence
  Synthetic
SDLERILKRLREVIKRAEELHRKTNEEDERVVREVIELHRKTNEDLREVIERVARG

SEQ ID NO: 15354 - protein, 56 aa, Artificial Sequence
  Synthetic
KEELRKAVEELEEKLERSVREDKKTSDDSARRAKKSVEDDRRTIEKLVEEAERSRK

SEQ ID NO: 15355 - protein, 61 aa, Artificial Sequence
  Synthetic
KDLEKLLDDIRKVLEEVTRRLKRISDELRRVLEEIKKRLDKDNEDLKRVIDEVKKLLDKKV

SEQ ID NO: 15356 - protein, 56 aa, Artificial Sequence
  Synthetic
REEIEKEIRDVEEELRRAVEENAELVKRVKEDAERVVRDSEKKSKEVAEELKDAVR

SEQ ID NO: 15357 - protein, 57 aa, Artificial Sequence
  Synthetic
SELEKILKELKDASREVEKRLRDILREDKKMLKKVVEELEEILRRLDEEVKKVKERL

SEQ ID NO: 15358 - protein, 60 aa, Artificial Sequence
  Synthetic
REEVVDRAKKEVDDHVKKAEDVVREVEKRSRESVKRLRDIVEELERLVKRLVDEAEREVK

SEQ ID NO: 15359 - protein, 60 aa, Artificial Sequence
  Synthetic
SETEKLLEEVRRIIEEIKKRIDRSLEEVRRSVEEAKRRIEKSLEDVEKSVRRVKKILDEG

SEQ ID NO: 15360 - protein, 56 aa, Artificial Sequence
  Synthetic
DRVLKEVEDLAREVKKRIDEVDKRVAELHKEVEDRLREVDKTVEELHRRVKKRADD

SEQ ID NO: 15361 - protein, 60 aa, Artificial Sequence
  Synthetic
SIEDVEREVKRLIERTKRHNDRVLETIRRLLEETKKHNEKVLREIRELIKRVEDTMRRRG

SEQ ID NO: 15362 - protein, 59 aa, Artificial Sequence
  Synthetic
EETIKRLLDEVREYVRKSEEDSERLLRDVERYVKESKERSERILKEARRLVKEVEDKIR

SEQ ID NO: 15363 - protein, 59 aa, Artificial Sequence
  Synthetic
SIEEVLEEVRDLLRKTKEDTKRILDEIRRLLEETKKRLEEVLREATKLLREVEDLVRKS

SEQ ID NO: 15364 - protein, 59 aa, Artificial Sequence
  Synthetic
EEEVKRLLEKARKLVEESKRESKEILDRARKYVKESLEEIERLLDELRKLIEELRRRIE

SEQ ID NO: 15365 - protein, 59 aa, Artificial Sequence
  Synthetic
SSEEILKEVKELIEESNRASEEVLKEVKKLLDESKKRSDEVLEEVERELKRLEESASRI

SEQ ID NO: 15366 - protein, 53 aa, Artificial Sequence
  Synthetic
VVREMRRLVEEDKRRIKEALDRLRKLVEDDKRRIEEVLREMRELIRELEERIR

SEQ ID NO: 15367 - protein, 61 aa, Artificial Sequence
  Synthetic
KEIEDILERLKETIKEIEDHIRRDLEELKKVIEELKRSLEEWKKRAERLIEELERLIRETG

SEQ ID NO: 15368 - protein, 56 aa, Artificial Sequence
  Synthetic
ERVLREAEERIRRLEEKLKEVNKRSEEMLRRLKEEHERVLREVKELIREIDDKARK

SEQ ID NO: 15369 - protein, 59 aa, Artificial Sequence
  Synthetic
GEDEVLRKVEKLLREVKERAEKSVERVERLLKDVEDKLKESHDRAKRLLEEVKKAADRG

SEQ ID NO: 15370 - protein, 56 aa, Artificial Sequence
  Synthetic
LKDLDRRIEEVVKRLEDEVRRHTKEVEEMVKRLRELVREHTERVKKIVEDLKREVD

SEQ ID NO: 15371 - protein, 59 aa, Artificial Sequence
  Synthetic
SEVEDVERRIREIIERLRRIVERHKEEVKKIIEKLEKLVRDHTERAKRIIERLKEVVDR

SEQ ID NO: 15372 - protein, 56 aa, Artificial Sequence
  Synthetic
EEVLKEVERLLEEVKELVERSHKEAEDLLKRVLDAMKRSVDEVEKLLEELKRRADK

SEQ ID NO: 15373 - protein, 59 aa, Artificial Sequence
  Synthetic
SKVEKVEEDIDKIIRRLEELVEEHRTEAEKTVKKLDDDVRRHNEKVEKIIRDLEEVVRR

SEQ ID NO: 15374 - protein, 56 aa, Artificial Sequence
  Synthetic
RKVLEDAKRLLERVMDEVRRSNEELKKLLEEVKRKLKKSVEDAERLLDEVRKRVEK

SEQ ID NO: 15375 - protein, 59 aa, Artificial Sequence
  Synthetic
SEVEEVDKRIREIVTTLKRLVEEHNDRARKIIEKLRRLVKKHEDEVEEIVRRLDEAVER

SEQ ID NO: 15376 - protein, 56 aa, Artificial Sequence
  Synthetic
EEVLKKVKELLKEVKRRLERSLEELERLLEEVLKLMKESNDKAKELLERVREKVER

SEQ ID NO: 15377 - protein, 57 aa, Artificial Sequence
  Synthetic
DFVERVKEEIKRIVERLKRLVKEHEDEVKRILDELRKLVETHKELSKDSLRKLEEVG

SEQ ID NO: 15378 - protein, 56 aa, Artificial Sequence
  Synthetic
ERVLEELRRLVKEVKERADRSSEKLNELLRKAEEDAKRSSEENNRRLEEVERRVRK

SEQ ID NO: 15379 - protein, 60 aa, Artificial Sequence
  Synthetic
DEERKIEEIIDKSRRDWERLLREAREIIKRSEDEWRELLERIKRLIEETRKRAKDLKKAD

SEQ ID NO: 15380 - protein, 59 aa, Artificial Sequence
  Synthetic
EEIRRLLEEMDKLSREASKRVEDILRELEERSRRMADEVRKLNEENKKLLEEAKKELKD

SEQ ID NO: 15381 - protein, 58 aa, Artificial Sequence
  Synthetic
DKEEIKEKLEELVERVVRELEKLLKELEDLSREVARRIKKIARDLEKLTKEVEEKLRR

SEQ ID NO: 15382 - protein, 56 aa, Artificial Sequence
  Synthetic
EEELERLIKELVDRARKLLEEVKKLIEDHREKLKRVLDEIKDLLRKHKETLDRTDT

SEQ ID NO: 15383 - protein, 58 aa, Artificial Sequence
  Synthetic
SKEDILRELRDRVERIKREIEKIFRDAKRLSEEVKRRIEDLLRKLKKVSDDVRERLAR

SEQ ID NO: 15384 - protein, 56 aa, Artificial Sequence
  Synthetic
EEELKELIKRLVEDAKRILEELKKLLDDHERKARRILERIEKLIKEHEDKARERER

SEQ ID NO: 15385 - protein, 60 aa, Artificial Sequence
  Synthetic
SEVEKLEEEVERSVRDLERELRDSEEKSKELMRRLDELVRRAKDHVRRSVEELRKTLSKG

SEQ ID NO: 15386 - protein, 58 aa, Artificial Sequence
  Synthetic
EEVRRILRDAERVIEEIKRRLEEDHKRLEEVIRRVEEKLRRILDEHDKVVKEIKEALR

SEQ ID NO: 15387 - protein, 60 aa, Artificial Sequence
  Synthetic
SEVEEAEKEVEDIMRRLKRKVEENKRHVDESVKEAEKLLRDSETRTRDIARRLKEELDKG

SEQ ID NO: 15388 - protein, 58 aa, Artificial Sequence
  Synthetic
KELTRILTRLREVIERVKRALEKSHDDHRRAVEEVRKELKRDHDDLRRVIEKVRRDLK

SEQ ID NO: 15389 - protein, 60 aa, Artificial Sequence
  Synthetic
SEVEEAKRRVDDIVRKLEELLKDSRRESERIMRELKRLLEELKRHVEDSVRKLREVLSRG

SEQ ID NO: 15390 - protein, 58 aa, Artificial Sequence
  Synthetic
RELREILRRAKEVIDKIREDLERDHDRLREVIEEIKKTLDRIHEEHRRVVKEVEDTLK

SEQ ID NO: 15391 - protein, 60 aa, Artificial Sequence
  Synthetic
SEVEEAEKEVREIMKELDKLLEDSKRESDDIRRDLDRVLEENKRHVDKSVTDLERVLSRG

SEQ ID NO: 15392 - protein, 58 aa, Artificial Sequence
  Synthetic
KELRRILRELEEVIKRVERTLREDHKELKRVIDRMKEDLERSHEEHERLVEEVERKLR

SEQ ID NO: 15393 - protein, 60 aa, Artificial Sequence
  Synthetic
SEVEEAKKDVERIMRELEKLVRDNKKHVDDSVRKLKKLLDDLRKHVEDSREELERVLRRG

SEQ ID NO: 15394 - protein, 58 aa, Artificial Sequence
  Synthetic
RDLRKILEDLERIIRRVEEELRRSHERHKEVVDRIKKVLDEIHRRHREVVKEVEKELR

SEQ ID NO: 15395 - protein, 60 aa, Artificial Sequence
  Synthetic
KEVEEAEDKVRRIVEDLKRKLEDLERHVEESVRRLEDLLRRSKKKSDDIMEKLTRTLSKG

SEQ ID NO: 15396 - protein, 58 aa, Artificial Sequence
  Synthetic
KELRRILKRMKDAIERVERELRRIHTRHKEAVDRVREELKRNHDELAKVIRKVREDLK

SEQ ID NO: 15397 - protein, 60 aa, Artificial Sequence
  Synthetic
DEVERADEDVERIVRELRRVLEENRRHVKESVERLERLVRKSKKDSKKIMEDLKRVLDRG

SEQ ID NO: 15398 - protein, 58 aa, Artificial Sequence
  Synthetic
TELRKILKKMKDAIREIKRTLDESHREHRRVVEEVKEELERNHKELKEVIDKVAKDLE

SEQ ID NO: 15399 - protein, 58 aa, Artificial Sequence
  Synthetic
DEVEDILRRVREAVERARESLERIHREHKKVVDEVRKALEKVLEDHARVVDEFRRKSG

SEQ ID NO: 15400 - protein, 56 aa, Artificial Sequence
  Synthetic
KDELKKEVEKLEEELKKELKRLKDHVKKSKEDLRRKLEDLKRHVERSVKRAEEEAR

SEQ ID NO: 15401 - protein, 58 aa, Artificial Sequence
  Synthetic
SEVEKVLRDLERAVKEVSERHRRNHEELRKVIKRVKEEHDRIHDEHRKVVEDLKRKIG

SEQ ID NO: 15402 - protein, 56 aa, Artificial Sequence
  Synthetic
REEIKKEVDRLKKELDENLKRLERDSERLKKELEDNLKRLEEHVRRSKEEAERDAK

SEQ ID NO: 15403 - protein, 58 aa, Artificial Sequence
  Synthetic
SDLEEVLKRLEDVVRRLEEELRRIHKEHRDVVRRVTEEHKRILEELKRVVERAREKDG

SEQ ID NO: 15404 - protein, 56 aa, Artificial Sequence
  Synthetic
RDRVTKEVRDLEEELRELLERLRAHVKRSEKKIEENLRRLEKRVEDLKKKIDDRTR

SEQ ID NO: 15405 - protein, 58 aa, Artificial Sequence
  Synthetic
RELEDIKRKHKKVVDDVREKLKESHRRLKEVIEEARRRLDEVRKKLEKVIREILTSAG

SEQ ID NO: 15406 - protein, 56 aa, Artificial Sequence
  Synthetic
IEDLKRYVEEVKRDLDDLIRRSEELVRRIKEDLDRALKELEELVRRIKKKLEEDRK

SEQ ID NO: 15407 - protein, 60 aa, Artificial Sequence
  Synthetic
SELDELRERVERHSRELRRTLEEAKKLVDDHKRTLREVLERIKKRVEDVKRELEKLVRDG

SEQ ID NO: 15408 - protein, 59 aa, Artificial Sequence
  Synthetic
REELKKIIDELRRVNEEAAKTLDEIIKRLEDVNREVNRTSKEVIDRLRKVLEEAERRTK

SEQ ID NO: 15409 - protein, 60 aa, Artificial Sequence
  Synthetic
EELDRIRKEVEDHERKLREVVKDIERKVEEHAKRLKKVIEDDERRVKEWKDTLEELIRRG

SEQ ID NO: 15410 - protein, 59 aa, Artificial Sequence
  Synthetic
KDEVRRVIKELRDVNRKVADALRKVEEKLKRVNDEMNKESKRTLDELDKALEEAERRAR

SEQ ID NO: 15411 - protein, 60 aa, Artificial Sequence
  Synthetic
DLLRELEARVRKHKRDLEEVLKKIEEEVRRHKKKLEDVLEELRRLVEDLMRELKELLEKG

SEQ ID NO: 15412 - protein, 59 aa, Artificial Sequence
  Synthetic
REELKRIIDELREVNERVNDESRKVIKELRDANKEADKKVRDIIRRLEDILRKAAEDTR

SEQ ID NO: 15413 - protein, 60 aa, Artificial Sequence
  Synthetic
KDLERLEKEVKEHKEDLERIVREAEKLVEDHERELEKVLRELEKTVRDVKRELEDLLRRG

SEQ ID NO: 15414 - protein, 59 aa, Artificial Sequence
  Synthetic
KEEVDRVLDELRKVNKKAADDLERVIRELEDVNRRVNERSREIIETLKRVLDEVREKTR

SEQ ID NO: 15415 - protein, 60 aa, Artificial Sequence
  Synthetic
DELRELKRKVDEHTRELERILKEIEDRVRRHKEKLDETVKRDKDRVDEWLRRAEELVRRG

SEQ ID NO: 15416 - protein, 59 aa, Artificial Sequence
  Synthetic
REEVEKIERRLREANKRAADALKKVIDELRRANEEVNRKSEETLKTLDKILEDVERKTR

SEQ ID NO: 15417 - protein, 60 aa, Artificial Sequence
  Synthetic
DDLERLAEEVKRHSEDLDRIVEEIRDRVRRYKEKLDEVVKEDEKRVREWRDRLEKLVRAG

SEQ ID NO: 15418 - protein, 59 aa, Artificial Sequence
  Synthetic
KDELDKIITRLEEANRKAAEDLRRVVEELRKAHEEMNRKSEKTKKDLDEVLEEAERRTR

SEQ ID NO: 15419 - protein, 60 aa, Artificial Sequence
  Synthetic
DDLERLKRRVEEYRRKLEEVLKTIEEEVRRYKKEAEKVLDEDRRRVEDWKRKLDEMVRRG

SEQ ID NO: 15420 - protein, 59 aa, Artificial Sequence
  Synthetic
EEDVRRIIDELRRVHKRANEDSKRVVDELRDVHRKVNETSEETKKRLDKVLKEAEDRTR

SEQ ID NO: 15421 - protein, 60 aa, Artificial Sequence
  Synthetic
KKLDDIRREVERLTDKLEKIVKRIKELVDRYRRKLERVLEEDDRRVKEWKRRMEELLRRG

SEQ ID NO: 15422 - protein, 59 aa, Artificial Sequence
  Synthetic
KEEVDKVLKDLDRALKKAADDLKRVIDELREVHERINRTSERTLTKLDRALEELEKRLR

SEQ ID NO: 15423 - protein, 60 aa, Artificial Sequence
  Synthetic
KELDEIRELVKRHKDKLKKIVDEVKERVDALKRKLKEILDEDRERVKKWVRDMEELVRRG

SEQ ID NO: 15424 - protein, 59 aa, Artificial Sequence
  Synthetic
KEDVDRVIRDLERVNEEANRRAKKVIDELRRVLEEAERTLRKTLEDLDRALEELARATK

SEQ ID NO: 15425 - protein, 58 aa, Artificial Sequence
  Synthetic
DEAEKILEELRKVVRELEEELRRNHEELKRVIEDVERKLRESNRRVEKVIKEVTDEKG

SEQ ID NO: 15426 - protein, 59 aa, Artificial Sequence
  Synthetic
EDVVRELEKLVEELKRRVTEVVETVARDSERLREELRRIVEESKRLVEELKRRAEEASR

SEQ ID NO: 15427 - protein, 61 aa, Artificial Sequence
  Synthetic
SELERVVEDLRRAAKKLADDLKRVIEEHRKYARDNKERLKKVLERLKRLAEELKKELERDG

SEQ ID NO: 15428 - protein, 55 aa, Artificial Sequence
  Synthetic
REVLEDVRRLIEDLERLITELRKENERVIRESEKLSRDIEREVERVIRELEETIR

SEQ ID NO: 15429 - protein, 56 aa, Artificial Sequence
  Synthetic
KEVEDVKREIDKVLEDARRLLKESDDTLKKILDKARRDLEESDRRLKEILDKVRKD

SEQ ID NO: 15430 - protein, 56 aa, Artificial Sequence
  Synthetic
FEELKDTVDKLRREIERRITESRRHVEELRRRVEEMLERSERNVREAEKKLEEDKK

SEQ ID NO: 15431 - protein, 57 aa, Artificial Sequence
  Synthetic
DEVERVEEELKKSDDELRRRMEEVKRALDKDNEDAKRMLDEVKKELEKILRKVEKEV

SEQ ID NO: 15432 - protein, 60 aa, Artificial Sequence
  Synthetic
KKEVVERLDKLVKEHHERNKRIVEEAKRLVEDSREKTRRIAERAKELVRRLKELVDRLSK

SEQ ID NO: 15433 - protein, 58 aa, Artificial Sequence
  Synthetic
DRIEDVKRKVKEIKEKVDRLLEESSKKVDDLNKKVRDLLTESNKRIEDIVRELRELAK

SEQ ID NO: 15434 - protein, 58 aa, Artificial Sequence
  Synthetic
EEAKEVLERLKRILEESRRASEENKKKLEKSHEELKRASDENKRKLERILDELREALR

SEQ ID NO: 15435 - protein, 56 aa, Artificial Sequence
  Synthetic
SAKEKIDKTLKDIYRKHEEVVRRVEKKHRDIHREHEEVVRRVEEEHRRILDELRKA

SEQ ID NO: 15436 - protein, 56 aa, Artificial Sequence
  Synthetic
EEEAKKFLDKLDKEVRDSMKRLEDHVRETKKRVEESVRRLEEHVKRTEEEVRETAT

SEQ ID NO: 15437 - protein, 56 aa, Artificial Sequence
  Synthetic
SVEDEVRRDLKRIYEKHEEAVRRVEERHERSNERLEDVIRKVEDKHREILKKLEDE

SEQ ID NO: 15438 - protein, 56 aa, Artificial Sequence
  Synthetic
EEDVKRVLDKLDEEVKDSVRELEEHVEKNERDVEEIAKDLERHVEETRKEVDKTAK

SEQ ID NO: 15439 - protein, 56 aa, Artificial Sequence
  Synthetic
KVEEKVRETLRRIYERHRKIVKEVEEKHRESNERLRREIERVKRKLDEILKKLEEA

SEQ ID NO: 15440 - protein, 56 aa, Artificial Sequence
  Synthetic
EDRVAEVLKKLKDDVDKSAEELERHVKRNRDEVRKIVEDLDRVLEELRTKVDEEAR

SEQ ID NO: 15441 - protein, 56 aa, Artificial Sequence
  Synthetic
SVEDKVRESLERIYKKHEKVLRDVERTLKEIHEEHREAVERVRRELERIKRKLEEL

SEQ ID NO: 15442 - protein, 56 aa, Artificial Sequence
  Synthetic
DKDVERVLKKLDDDVRKSVKELTDVLKRLREEVKRSVEELEDVLRKLDKEVDDTAK

SEQ ID NO: 15443 - protein, 56 aa, Artificial Sequence
  Synthetic
DVEDRIRKSLEEIYRRHETEVRKIKRKHDESHRRHEKVVREVTEDLERIKRRLEEL

SEQ ID NO: 15444 - protein, 56 aa, Artificial Sequence
  Synthetic
EEDAKRVLDELEEKVRRSVKKLREHVEENEKRVEDSVEELKRILEELRKAVDETTR

SEQ ID NO: 15445 - protein, 59 aa, Artificial Sequence
  Synthetic
SKKDEVEKLLKESERHSKKLVEDAKRLSDESKKHVEELVRRAEEELEKSDRDVKKVKDD

SEQ ID NO: 15446 - protein, 59 aa, Artificial Sequence
  Synthetic
EEVMDRVRRRLERDIRELRKALKRVEDTNEEITRELEKAMKEVKDTSDRILEKLRRARK

SEQ ID NO: 15447 - protein, 60 aa, Artificial Sequence
  Synthetic
SVKDKLKELLKDSKRNSDRLVERAKELLDRSRKHSKELEDRARKLLEDSRRKVEELERAN

SEQ ID NO: 15448 - protein, 59 aa, Artificial Sequence
  Synthetic
REVLEKARRDLERDLRENKKALDEVRRTLEEDSRRLREVLEEVKRISTKIIERLREIRR

SEQ ID NO: 15449 - protein, 56 aa, Artificial Sequence
  Synthetic
SEKEDAEKKLRDILTDLARIVREVEEALKKILDDIRKVSEESKRASDESLKRARDA

SEQ ID NO: 15450 - protein, 56 aa, Artificial Sequence
  Synthetic
GEELEELLRRLEEAVRRIAERLRKLLKELEEKARRLAEESKKLLEKDKEDVKRAAE

SEQ ID NO: 15451 - protein, 56 aa, Artificial Sequence
  Synthetic
SEKERIKEESKKSLDDLRRASERSKEELDRILKRIDEASKRSKEESDRSLKEVKDR

SEQ ID NO: 15452 - protein, 56 aa, Artificial Sequence
  Synthetic
GEELKDVLRELRETNRKLVEDSRKLLEELDRDVERLADESRKLLEDDKRKVREVAR

SEQ ID NO: 15453 - protein, 56 aa, Artificial Sequence
  Synthetic
SDEERIDELSKKSLEDLKRVSDDSKRKLDDILKKIEDASRESEDKLRRILEKARRD

SEQ ID NO: 15454 - protein, 56 aa, Artificial Sequence
  Synthetic
GRELERILEELRTDNDRLAKESDKLVKELEEEVRELIKRSETLLEELRKDVEELAK

SEQ ID NO: 15455 - protein, 57 aa, Artificial Sequence
  Synthetic
DAKERVDDALKKILDDHRRVLKKVEDDHRDSHREHRRVVEEVKRELEKVLKKLRDAG

SEQ ID NO: 15456 - protein, 56 aa, Artificial Sequence
  Synthetic
KEDLDRMLEKLREIVERSRDKLRRHLEKNKREVDDSKRRLEKMLRDLEKKVRDAER

SEQ ID NO: 15457 - protein, 57 aa, Artificial Sequence
  Synthetic
DDEERVKRKLEEVLRKHKEVVDEVIERHRRSHKRHRDMLREVDKKHRRILTELEKAG

SEQ ID NO: 15458 - protein, 56 aa, Artificial Sequence
  Synthetic
VEDLKRVLEDLDREVRESKERARKHVEDNERKVEESKKRADDNLRRLERKIREAAR

SEQ ID NO: 15459 - protein, 57 aa, Artificial Sequence
  Synthetic
SVEETVDEELKKIHETHKRVVDKVRREHEKSHKKHRDILKRVEEVHRRILTDLERAG

SEQ ID NO: 15460 - protein, 56 aa, Artificial Sequence
  Synthetic
KKDLDEMLRRLKRKVDESERDLKKHLDDNKRAVEKSREDAERNLKELRDKIREVKR

SEQ ID NO: 15461 - protein, 63 aa, Artificial Sequence
  Synthetic
REEEEARKVLEELKRDVERNERESKEILDKDKRDVEEWVKELEKMLEESKKLVDDVRKAKKDL

SEQ ID NO: 15462 - protein, 55 aa, Artificial Sequence
  Synthetic
EELKKAVEDIIRTLREVLEKSRKTLKDSNDRLRRALEKAREDSKRSIRRLREELR

SEQ ID NO: 15463 - protein, 59 aa, Artificial Sequence
  Synthetic
SVREDAKRLLEELERAVRELVERLKKLIERHRRASEDTRRELEKLLRELEKAVEELKRG

SEQ ID NO: 15464 - protein, 58 aa, Artificial Sequence
  Synthetic
KALEDVKEALDRILERVKRAIEEARKKLDDVDEHNREVIERVEKEIDRILKDVEDAAR

SEQ ID NO: 15465 - protein, 59 aa, Artificial Sequence
  Synthetic
SVEEEARELIERLRKLSEDTMRRLTELLKEHERLSRETKKEAERLLDELRKKVDDLTRD

SEQ ID NO: 15466 - protein, 58 aa, Artificial Sequence
  Synthetic
EVLERVKRELDRILDHNKKVVDEAERALRRVDKHNEDVLREVEKTLERILDKVKESAR

SEQ ID NO: 15467 - protein, 57 aa, Artificial Sequence
  Synthetic
SVEEKLEKIVRDLERRVRKSEEDLRRMVEEVERTVEKHREELKRVVDTLRKIVRDKG

SEQ ID NO: 15468 - protein, 59 aa, Artificial Sequence
  Synthetic
EKVARDIKDKVREIIRRNEEVLEEVDRRARELIERLERTIEKSERDVERIIRELRERAK

SEQ ID NO: 15469 - protein, 59 aa, Artificial Sequence
  Synthetic
SKEEEAEKLVRDLEDSSRKHKDRLRKLVRDLEELVKEHERDLKRIVEELKKLVDDASRS

SEQ ID NO: 15470 - protein, 55 aa, Artificial Sequence
  Synthetic
KELEEELRRNLKEVREVTEDAKRKLRDILRKVEDASRRVKEMLDKILKRVEEEIR

SEQ ID NO: 15471 - protein, 57 aa, Artificial Sequence
  Synthetic
KLDEDIRKLLKEALDRNKEMLERLKKTLDEALEKVKKLLEDLRRVNKEVEDELRRAG

SEQ ID NO: 15472 - protein, 59 aa, Artificial Sequence
  Synthetic
EDVLREVIRRIRKVIEDTDRTWKRLIDEIRKEVKDVLDKARRLIRESEKLMEDIKRRTK

SEQ ID NO: 15473 - protein, 56 aa, Artificial Sequence
  Synthetic
DMEKRIEKLLKDMLDRVRELHKRVREVNKEVNKRVKELHDEVRKVNEKVNKAVKDR

SEQ ID NO: 15474 - protein, 59 aa, Artificial Sequence
  Synthetic
EEVLARVIERIRKDVEKVLREAEKHIEESRRLARKVLEELRRHIEENRRLLEEVDRRRR

SEQ ID NO: 15475 - protein, 57 aa, Artificial Sequence
  Synthetic
EVEKKVEELLKRIEDDNKRVADRSRKLLRELKKRLEDVVRESRELLRRILKKLKEAG

SEQ ID NO: 15476 - protein, 56 aa, Artificial Sequence
  Synthetic
EDEVADRLRKLRKESEEVVERSDRHLKDLERRIEEMAERSRRHLKRLEDKIREDAR

SEQ ID NO: 15477 - protein, 59 aa, Artificial Sequence
  Synthetic
SMEDRVREMLRTIKRVIEEAHERSKKILDEDRKVLKAVEDAVRDVLTKIKKLLDDARRR

SEQ ID NO: 15478 - protein, 55 aa, Artificial Sequence
  Synthetic
EEVVKRAKKLLEEIEKLARESLERLRDNLRKTEKLLKDLLDEAKRLLEEIKETVD

SEQ ID NO: 15479 - protein, 60 aa, Artificial Sequence
  Synthetic
DIEEEVKKILDEIRERIKKMKRDLERLSKEDEDVLRKVKKDVDEVLKRAEESLRDVKRRG

SEQ ID NO: 15480 - protein, 55 aa, Artificial Sequence
  Synthetic
EEVLRKLEEILRDIKRKADELRKRYRENIEETERLLEELLRRAEELLRRLDETAR

SEQ ID NO: 15481 - protein, 61 aa, Artificial Sequence
  Synthetic
SEAEKLLEDIRRIIKEVKENVERSLEKIKRLIEELEKNARDLVRRIRKLIEDLERKVRRDG

SEQ ID NO: 15482 - protein, 59 aa, Artificial Sequence
  Synthetic
EKVIRDIEKLIEDLKRISEKANEDNKRLIDDMRRISKEVARTIKELIERLRKIVEEARK

SEQ ID NO: 15483 - protein, 61 aa, Artificial Sequence
  Synthetic
SEAEELLERIKKLIEDLKRDAERLLREIEEMIKDIRRHVEEDLRRLREVIKEIKRLVDERG

SEQ ID NO: 15484 - protein, 59 aa, Artificial Sequence
  Synthetic
EEVEREIRRLIEEMKRISEEVRKEIKRLIDELEEIVRRAKEALKKLNEELKRIVDEAKR

SEQ ID NO: 15485 - protein, 59 aa, Artificial Sequence
  Synthetic
SKVEEVLKRLERLIRELKRLMDEVREDNREVLERLERYAERNERENRELLKKLEDVARR

SEQ ID NO: 15486 - protein, 56 aa, Artificial Sequence
  Synthetic
KEELDKMLKTAERVLREIEKDIEKLDRDLKRVVERIRDRSRRLDEAAEEIVRRIED

SEQ ID NO: 15487 - protein, 59 aa, Artificial Sequence
  Synthetic
SKMEEVLKRLEKLLRELEEYVERNERENRKLLEELEDYVRRNEKRNKEILEELRDVVRR

SEQ ID NO: 15488 - protein, 56 aa, Artificial Sequence
  Synthetic
DEELRKALERLRRVVEKVEDISRELDDRLRRVVEKAEEISRRLDEEIKEVVDRAEK

SEQ ID NO: 15489 - protein, 59 aa, Artificial Sequence
  Synthetic
SKVEKVLDDMRRIIEEAERLLEEVKRRHDEIIERVKRYAEENRRRNEELIEDLKRVAEK

SEQ ID NO: 15490 - protein, 56 aa, Artificial Sequence
  Synthetic
KDDVRRLLEELRKVVEDVKRLSKKMNDRIEKIAKEIEEESERLDRTIAEIVKEIEK

SEQ ID NO: 15491 - protein, 59 aa, Artificial Sequence
  Synthetic
DEVEKVLEELRRLLKEDEDIVRELLKRLKELLEDIDRIAKETEKEWRKILREIEELRRK

SEQ ID NO: 15492 - protein, 59 aa, Artificial Sequence
  Synthetic
EDAEREVDRVVRTIEESTKDAREKVKRMADEIERIIKEVEDLNRKLVEEIERVIREVER

SEQ ID NO: 15493 - protein, 56 aa, Artificial Sequence
  Synthetic
DSEETLRELVKTIEDSSRKVKKRNEELARELRRRIEEAREANDRLVETIRKEIREL

SEQ ID NO: 15494 - protein, 56 aa, Artificial Sequence
  Synthetic
REELEKTARKLIEDDEKKARDTEREWEELIRDIERLVRESLEAWKRLREEIRETVR

SEQ ID NO: 15495 - protein, 56 aa, Artificial Sequence
  Synthetic
KSEEELRKLVRELEELIERMERTNEKLLRELKEVLDRARERNEELVRRLEDLIRRL

SEQ ID NO: 15496 - protein, 56 aa, Artificial Sequence
  Synthetic
EEELRKEAEDLIREIEEKVRRSKRNLEELIREIRELVERSEDEWRKLIKRIADAVK

SEQ ID NO: 15497 - protein, 56 aa, Artificial Sequence
  Synthetic
SSEETLERLLREIERVLEEARKRNEDLVRKIREVIKEALERNKRMLEEIKKEIDRL

SEQ ID NO: 15498 - protein, 56 aa, Artificial Sequence
  Synthetic
SEELLRTAKRLLEDIERIVRETLKKWRDLEREIRKLVRESTENLKRIIEEIRERAR

SEQ ID NO: 15499 - protein, 55 aa, Artificial Sequence
  Synthetic
SKVDEVIRDLARLLDELRRHVDDSVRRMDEVVKRSTREADELAKRLDELVKEVEK

SEQ ID NO: 15500 - protein, 56 aa, Artificial Sequence
  Synthetic
KEKIDRIIRELERILEEAKKKHEDVLRRLEDSLRRVAELLKAALDRLREIVDRLRR

SEQ ID NO: 15501 - protein, 55 aa, Artificial Sequence
  Synthetic
SKADDVIRKLRELLEELRTHVEKSIRDLRKMLEDSTRHAKRSIEELERLLEEVRK

SEQ ID NO: 15502 - protein, 56 aa, Artificial Sequence
  Synthetic
EEKLKDLIRKLRDILRRAAEAHKKLIDDARESLERAKREHEKLIDRLKKILEELER

SEQ ID NO: 15503 - protein, 55 aa, Artificial Sequence
  Synthetic
SKVEEVVRTLDELLKRLEEHVKESIRRIKKVIDDSNREADELIRDIDRLLKELEK

SEQ ID NO: 15504 - protein, 56 aa, Artificial Sequence
  Synthetic
KDRVERIIRELRRILEEIRDLHRKLEEELRRSLKEVEDRLRELLKKLEDILRELRR

SEQ ID NO: 15505 - protein, 59 aa, Artificial Sequence
  Synthetic
DEVEDLLRKLKDTIRRLKAHADRDLKKLEEILEKLRRHVEKNLRDLERILKELKDLSRT

SEQ ID NO: 15506 - protein, 59 aa, Artificial Sequence
  Synthetic
EEVAERVRRVIKELRKLLEEIARALEDVNKKAKEINDKADEDSKRVNDELKRIIKEIRD

SEQ ID NO: 15507 - protein, 60 aa, Artificial Sequence
  Synthetic
SEVDELRRRAEESSKKIRKIAEELTKRLKDLLETIRRLMRKIEEDMKRTSEEIKDLIRRG

SEQ ID NO: 15508 - protein, 59 aa, Artificial Sequence
  Synthetic
DRLRDVVKKLHKKNKDILDEIRDIVRRLKEEVDTILKEIKERLEELHKNNERLLREAKR

SEQ ID NO: 15509 - protein, 60 aa, Artificial Sequence
  Synthetic
SAKEKLEDLLRKLKRILDELEKTSREMKERVERIIRELEKTVREVHERIKRLIDEALKRN

SEQ ID NO: 15510 - protein, 55 aa, Artificial Sequence
  Synthetic
EELKKELEDLLRKIEKLIKESEEKWRRLLEEIKREIERLRETYAEILRDVKRRDK

SEQ ID NO: 15511 - protein, 60 aa, Artificial Sequence
  Synthetic
SAEETVRKLLEEIKEIIKRMEDRVREVLEENRKSIEDLEERVRRLHEEVERIIREALEDL

SEQ ID NO: 15512 - protein, 55 aa, Artificial Sequence
  Synthetic
DEVKRELKRILEEIEKLIEELLRRMKESNKKIRKLAEDLTREYKRLLDEIRKRRK

SEQ ID NO: 15513 - protein, 55 aa, Artificial Sequence
  Synthetic
REVEEVVKRAEEVIRRLEKEVEDIVRRVAKHLKDNEDHARRSVERLRRDIEELKK

SEQ ID NO: 15514 - protein, 56 aa, Artificial Sequence
  Synthetic
DELVKEVKKKIDDVLKKAEDLARKLKKEHDEVVARITEAHDEVKKRVEKVLKELED

SEQ ID NO: 15515 - protein, 55 aa, Artificial Sequence
  Synthetic
SKVEDVIREIRELIKRLEKHVKDSVREVRKHIEDNKRKVEKLVKEVEDVIRELRK

SEQ ID NO: 15516 - protein, 56 aa, Artificial Sequence
  Synthetic
RELAEELRRRLDEVLEKATRLHRELEKRHDDVLREAEKRLRDLKREIDKVLDDLRR

SEQ ID NO: 15517 - protein, 56 aa, Artificial Sequence
  Synthetic
EEVERVVKELRDHLAETKKKIDEIIKRLDDHIEENRERVERMVEELRRILKEIRDS

SEQ ID NO: 15518 - protein, 56 aa, Artificial Sequence
  Synthetic
REVVDEVRKEHRDVLREAEELIKRVEKDHEKSHREVKKLIEDVERRLREVLKELRD

SEQ ID NO: 15519 - protein, 56 aa, Artificial Sequence
  Synthetic
KEAEDTIRKVSKHIEDNKRKVEEMIKKLKEHLKETEEKIRRIVKKVRDEVRKLEEN

SEQ ID NO: 15520 - protein, 56 aa, Artificial Sequence
  Synthetic
EKLVRDLKRRHKESHDEARKLIEEVRREHEEVLKRAEDLIRELDKRLKEVLDKLRK

SEQ ID NO: 15521 - protein, 57 aa, Artificial Sequence
  Synthetic
SEAEEVVRRVEKHIRDTEKKIRDIVRRVKEEVDRNSERVREMVERVRKEIEELERAQ

SEQ ID NO: 15522 - protein, 56 aa, Artificial Sequence
  Synthetic
KEVVDELKKRHREVLEEARRLIEELKERAERSHRESKKLIDELREEIRRVLEERRR

SEQ ID NO: 15523 - protein, 57 aa, Artificial Sequence
  Synthetic
SEVEDIVTKLRDKVERHREEVKRIIDTLKKLVEEHKRRVDDEVKKLDDTVKRLREAN

SEQ ID NO: 15524 - protein, 59 aa, Artificial Sequence
  Synthetic
KRVDDLLREVEERLERSNREARKLLEEVKREMEESHRRLKKLLDEVREKVRRVVEELRK

SEQ ID NO: 15525 - protein, 60 aa, Artificial Sequence
  Synthetic
KVEELVKEVDERIKKVLDDLRRALEDVRKKAEDSVRRMEELSEKVKRDLDRVIAKAEEKG

SEQ ID NO: 15526 - protein, 55 aa, Artificial Sequence
  Synthetic
EEVVKRLEEILRRLKETIDRVLERLKRRVEDHDRKVEKRVRENEKAVEDLKRRID

SEQ ID NO: 15527 - protein, 60 aa, Artificial Sequence
  Synthetic
SVEEVLEEARKDIDRLIRRMEEISERAKEKIERLIDELRKISEEANKKNEEVLRELREKG

SEQ ID NO: 15528 - protein, 56 aa, Artificial Sequence
  Synthetic
REDIKREVDRLLEEIRRLIERLRENVKKLLDEIRKLIEELDENVKRSLKKLRDDIR

SEQ ID NO: 15529 - protein, 60 aa, Artificial Sequence
  Synthetic
SLDDILREVRRTSRELNEESRRIVDRAKRESEELLKELETILRDATRRLDDLLRKLDEKR

SEQ ID NO: 15530 - protein, 60 aa, Artificial Sequence
  Synthetic
RETVVKELEDKVREHLRTNRELIERLEKEMRDHLREIKRKIEELERRIRKLVEEVKRRID

SEQ ID NO: 15531 - protein, 61 aa, Artificial Sequence
  Synthetic
DELEDLVRKAEKLVRESEKKIKEIVDDARRLIEDSEREIREIVKKLRELSKRVEEELRRDG

SEQ ID NO: 15532 - protein, 56 aa, Artificial Sequence
  Synthetic
KDLLKELRDKSKRVLEKLRRLLEEINKRSRDVLEKLKRLADEVRESNREVLDRARK

SEQ ID NO: 15533 - protein, 56 aa, Artificial Sequence
  Synthetic
RELEEIVKDAERLVKKDTEDIRDKVRRAEEVVKKDTEDLEESVKRVKDKVKELEDA

SEQ ID NO: 15534 - protein, 56 aa, Artificial Sequence
  Synthetic
EELLREIEERIKRSLDESRKLVREIEKKVDESNERSRKLVEDVEREIEEVLKRLAD

SEQ ID NO: 15535 - protein, 59 aa, Artificial Sequence
  Synthetic
SSEDILREVKKLLDDSLDKLRRLIEKIKEDLDRSVDRHRKLSEEIRRRHERVREAVERR

SEQ ID NO: 15536 - protein, 55 aa, Artificial Sequence
  Synthetic
EDVARKLRELVREHSKEVEDKVRRAARLVEEHTERSDRVADKLRKHIEETKKRID

SEQ ID NO: 15537 - protein, 59 aa, Artificial Sequence
  Synthetic
SKEEILKEITDRVRESRKRTKKLLDDVREELERSHRRLEKLIREVEKRLREVKRKVDES

SEQ ID NO: 15538 - protein, 53 aa, Artificial Sequence
  Synthetic
VVRDLRRLVKEDTDRARKVVRELEREVERDKEEVERIVDKAEKKVRELEERIR

SEQ ID NO: 15539 - protein, 56 aa, Artificial Sequence
  Synthetic
DEVEKAVADLRRLNEEHTRDIDKAARDLERLVKKHTDEVRKLVRDLEKLVKDLKDA

SEQ ID NO: 15540 - protein, 59 aa, Artificial Sequence
  Synthetic
EKLEELLKEVEETTRRSLRRLEELLRKVERAVRESHKELKKLLDEVREKVKKVLEELRR

SEQ ID NO: 15541 - protein, 56 aa, Artificial Sequence
  Synthetic
DEVEKAVRDLEKLNEEHTRRVEKVVTDLRDLVRRHTEEVRKLVDELRELVERLRRA

SEQ ID NO: 15542 - protein, 59 aa, Artificial Sequence
  Synthetic
KKLEKLLDDVRKTTETSHERLKRLLEEVEERVRRSHEELKDLLRKVKELVEKVLRELKE

SEQ ID NO: 15543 - protein, 56 aa, Artificial Sequence
  Synthetic
SEVEKLAKELRDLVREHTKRVRELIDELKKRVEDHTRKVEEIVKRLKKLVDDLRDA

SEQ ID NO: 15544 - protein, 59 aa, Artificial Sequence
  Synthetic
KKLEKLLKEVRELVKRSHDELKKLLDRVREAVEKSKRRLEKLLDTVRRLLEKVVRDLER

SEQ ID NO: 15545 - protein, 56 aa, Artificial Sequence
  Synthetic
SEAEKLVEELRRLNERHTRRVEEVVRRLDEEVKKHRKDVRELVRELRKLVDELRKA

SEQ ID NO: 15546 - protein, 59 aa, Artificial Sequence
  Synthetic
EKLEELLREVEETTEKSHRDLKRLLDRVREKVEDSHKELEELLKEAKDRVDRVLEELRR

SEQ ID NO: 15547 - protein, 60 aa, Artificial Sequence
  Synthetic
SLEDKVRDDVRKLLAEAKKVADDLRKVVEDHRKTVEDVIREIRRRVEEHLKKLKELIDAG

SEQ ID NO: 15548 - protein, 56 aa, Artificial Sequence
  Synthetic
DRVLKRIEEEIRRLLKELREIVKDLERLDRELTDELRKLVEEVRRLSETVLDEARK

SEQ ID NO: 15549 - protein, 59 aa, Artificial Sequence
  Synthetic
SLDEDVAEKMKELEKENKDLLDTIRRLIEELEKHARELLKRIEDLIRELTEDAKRLEDS

SEQ ID NO: 15550 - protein, 56 aa, Artificial Sequence
  Synthetic
RRILEEIRRTNEELTERVRDLVEEMRKTSEELLKEVRKIADEVRRTVEEALKRLEK

SEQ ID NO: 15551 - protein, 61 aa, Artificial Sequence
  Synthetic
DEAEKILRDAKRLVEELSKKLEDNLREIKEVIDRLSEELDRNLKEHRDLIRKLEEDMDRKG

SEQ ID NO: 15552 - protein, 55 aa, Artificial Sequence
  Synthetic
EERAREVEEDIKRAEEEVERSIRESKKRTRDAEREVRESKKKSEDHIREVEKRIR

SEQ ID NO: 15553 - protein, 61 aa, Artificial Sequence
  Synthetic
SELEELLKELKEIVERSADHLRRSNDDLRKIIEEVTKTLEKILEDLKRIVEEVVDRARKKV

SEQ ID NO: 15554 - protein, 56 aa, Artificial Sequence
  Synthetic
EEELKKKLKELKDRAKETNERHRRDVERLMEKLRRDLERLDREVKDLEKKLREEEK

SEQ ID NO: 15555 - protein, 56 aa, Artificial Sequence
  Synthetic
SDREEIKRRVEEEAKKSRENLKETLREVDERVRDSERNLKRHHEEVKKAIDDLRRS

SEQ ID NO: 15556 - protein, 56 aa, Artificial Sequence
  Synthetic
KRILDDVRRLLEELKERYRRIVDEIKKLLERLKEAYKRNLDRVRELIERIEKEIRD

SEQ ID NO: 15557 - protein, 59 aa, Artificial Sequence
  Synthetic
SELEEVKERIERLVRRHKEELEKVRREIEREVKKHEKDLEDLERRSREHIETAERLLAE

SEQ ID NO: 15558 - protein, 56 aa, Artificial Sequence
  Synthetic
DRILEEARRLLDRLREENEKVLKEAEDMLKRLEDENRKMLEENEKLLKELKKEVDK

SEQ ID NO: 15559 - protein, 59 aa, Artificial Sequence
  Synthetic
SEVEEVLKTIEKKDEEHKRELERVKEEVDEDAKRHRERLKKVDRDVKEEIKRLRKLLED

SEQ ID NO: 15560 - protein, 56 aa, Artificial Sequence
  Synthetic
EKILEEIKRRLDELRKRNEDLLRRVKELLDELREENRRLLEDAKRLLEEVLKRARD

SEQ ID NO: 15561 - protein, 59 aa, Artificial Sequence
  Synthetic
SELEEVEKKVREDARRHKEELRRVEEEVKRNAEKHRDELRRVREDIERKIRTLRELLKE

SEQ ID NO: 15562 - protein, 56 aa, Artificial Sequence
  Synthetic
EEILRRVKKLLDELRDENRRLLERVRELLERLREENERVLREVKKLLDEVKREAEK

SEQ ID NO: 15563 - protein, 59 aa, Artificial Sequence
  Synthetic
SEREKLLKELKDNLDESRRRVEELLKRIKENLEEVKDRAKKTLDDLKRDIEELRKLVER

SEQ ID NO: 15564 - protein, 59 aa, Artificial Sequence
  Synthetic
EDVKRRLRDLSRRLAREHEKVIEKLRRLSDELEKIHREIEERLERLSDELRKEADKARK

SEQ ID NO: 15565 - protein, 61 aa, Artificial Sequence
  Synthetic
DEARELLKRLREINEKLKKDVEEIERRLEKYNRDVKRKLDDSIRELKEKLDRLRERIRDEG

SEQ ID NO: 15566 - protein, 59 aa, Artificial Sequence
  Synthetic
EDVRRAVEELVRRHKDTVKKIEESVRRLVEEHKRTVKEALDRSRRIAEEIKRVLDEAAR

SEQ ID NO: 15567 - protein, 60 aa, Artificial Sequence
  Synthetic
SEEEKLLTELKKLNDDLERRVRKSLDEIRRYNEKMREDVRRSDREVREEKKRLDEKLKKD

SEQ ID NO: 15568 - protein, 59 aa, Artificial Sequence
  Synthetic
EEALKKVRELVERHKRTVDEALEKSERLLREHERTVDEVLDRSRRAVEEVKKTLDDARK

SEQ ID NO: 15569 - protein, 60 aa, Artificial Sequence
  Synthetic
REAEEVRRRIEESHEEVRRRARKDERDLEESHKRLEEKAKELKDELRKILKDIDDLAKSN

SEQ ID NO: 15570 - protein, 59 aa, Artificial Sequence
  Synthetic
EDVLRDIEKLVRDNEEALDRILKRTKELVDRNLEAIDRILKEVEELVRRIKELLDRAKK

SEQ ID NO: 15571 - protein, 61 aa, Artificial Sequence
  Synthetic
SEVEEVLERLKRKLDEIERESRESAKKIRREIERIEKEARDSLRRLKKLIKEIEDRVRRDG

SEQ ID NO: 15572 - protein, 56 aa, Artificial Sequence
  Synthetic
REELEKLLKRLEEVVRESEKEIEDLLRRVRELIERIKREHEKILKEAEEVIRRVKK

SEQ ID NO: 15573 - protein, 61 aa, Artificial Sequence
  Synthetic
REVEEVLRELEEHIERSKRKSEESLKEIRRRIEEIEERSRRSLTELKKRIDDIKRRVEKDG

SEQ ID NO: 15574 - protein, 56 aa, Artificial Sequence
  Synthetic
KEDLKRLLDKVTEVHKESAKEIRKLLDEARKVIEDSLRAIRDILRKIKETIDRDKT

SEQ ID NO: 15575 - protein, 61 aa, Artificial Sequence
  Synthetic
EEVERVLEKLKRHIDDSRRKSKRSVDEIRKHIERSKRRSEESVERVKRELERIEEKVRREG

SEQ ID NO: 15576 - protein, 56 aa, Artificial Sequence
  Synthetic
EEELKKLLEEAEKVHRDSKRELRKLVKEARDVHRESMETVKRLLDELEREIRRAET

SEQ ID NO: 15577 - protein, 61 aa, Artificial Sequence
  Synthetic
SEDEEALKKLKEHIDRSREESKRSLDRVKREIERIREEIERDLRRLREELKKIEDRLRRDG

SEQ ID NO: 15578 - protein, 56 aa, Artificial Sequence
  Synthetic
EDELRKLLEDAKRVHKRSKDELKRLLEEAEKVIRDAKRKIKKLLDELRKVLEDARR

SEQ ID NO: 15579 - protein, 61 aa, Artificial Sequence
  Synthetic
DEVRRVLEELKEHIKRSEKRVRENEEEIRRHIEKSKRDSDESLKELARLIKKIEDDVRREG

SEQ ID NO: 15580 - protein, 56 aa, Artificial Sequence
  Synthetic
EEELKKILDEAEERHRRIEERHKDLLRKAEEVHRDSLRRLREILRRAEEVIRREKT

SEQ ID NO: 15581 - protein, 61 aa, Artificial Sequence
  Synthetic
KEVEEDLERLKKHTEDTRKRARDNLERIKEELEEIRKESEDSARKVRRDIEEIKRRVDETG

SEQ ID NO: 15582 - protein, 56 aa, Artificial Sequence
  Synthetic
ERELEKLLKEHEKTIRDIEEEHRRLLKELKDVVRESSRELEELLKEAEDVIRRVKK

SEQ ID NO: 15583 - protein, 61 aa, Artificial Sequence
  Synthetic
DEVREALKRLEDETRKNKKESDKSLERLKEESKKNKDESDKSVKNIEDKIKKLKEDLDRDG

SEQ ID NO: 15584 - protein, 59 aa, Artificial Sequence
  Synthetic
EEVKRALDELVKDHRRVLEESARRIDEIVERHRRLLDDSLRRIAELVRRVEETLREERR

SEQ ID NO: 15585 - protein, 60 aa, Artificial Sequence
  Synthetic
DEVEKALKELEDDLRELKKRSEESLKNVEEEIKRAKKELDESLDNLRKKIEELKRRLEKD

SEQ ID NO: 15586 - protein, 59 aa, Artificial Sequence
  Synthetic
EEVLRKLETIVRKIREELDRSKKKLEKLIEEAKRELERVLKEHEDLVKRVRDVLEDARR

SEQ ID NO: 15587 - protein, 61 aa, Artificial Sequence
  Synthetic
DDVRETLTRLRKETERNKRESDKSLENLKRKSEDNKRKIEESLKNMKRRIDEVKRRAEKDG

SEQ ID NO: 15588 - protein, 59 aa, Artificial Sequence
  Synthetic
EEVKKELDEILRRHKEVLRESERRLEKLLRDHRRRLEEALEEHKKLIDEAEETLKRIRD

SEQ ID NO: 15589 - protein, 61 aa, Artificial Sequence
  Synthetic
SEVEKALKELEDKTRKNKEDSERSLDKLRKDIEELRKKAERSIRNMRDKLRKLRDDVRKEG

SEQ ID NO: 15590 - protein, 59 aa, Artificial Sequence
  Synthetic
EEARRKLKELVDRHEEVLRRSLERLKRLVEEVRRTLEKILRDHERLLDELRRDLEKDRK

SEQ ID NO: 15591 - protein, 61 aa, Artificial Sequence
  Synthetic
DEVEERLRELEETTKENKRRAERSLENVRKKSRDNDKRIKESLDNIRREIKRLRDKVRKDG

SEQ ID NO: 15592 - protein, 59 aa, Artificial Sequence
  Synthetic
REVLEKLKEIVERHEEVLRRIKKKHEDLVREHRKRLEEARKRHEKLVREAEKTLDDVRR

SEQ ID NO: 15593 - protein, 59 aa, Artificial Sequence
  Synthetic
EEVERILDELRRRNEDMRRRSEENERELRKRNTELRKKVEDSLRRLREDLKRIKKLVEE

SEQ ID NO: 15594 - protein, 59 aa, Artificial Sequence
  Synthetic
EEVTKALEELVRRHRKTLEESLRKAEKVLRDHKESLERSEKKLKELMEEVKKLLDDARR

SEQ ID NO: 15595 - protein, 60 aa, Artificial Sequence
  Synthetic
SREDEIRKRLEESLERVKKIIEDIKRRIDESLERIKELLKEIDERSKRSLEKIRRKIERE

SEQ ID NO: 15596 - protein, 56 aa, Artificial Sequence
  Synthetic
EELLRRARKAHEDLLREVKRRIERAEEEHKRLLDELRKVVERSKTEIKKLLDELRK

SEQ ID NO: 15597 - protein, 63 aa, Artificial Sequence
  Synthetic
SRVEDVERKLRRKLEELKEDIERLREESRRSLEELERDSDRNRRESEDSLRRVEERIRRIKDD

SEQ ID NO: 15598 - protein, 56 aa, Artificial Sequence
  Synthetic
RETLRRVEREIERLLRELEETLKRSEEELKRIVDEHRKLLERSKRELEKLVDEVRK

SEQ ID NO: 15599 - protein, 61 aa, Artificial Sequence
  Synthetic
REIEEVLKRVEKVVRDDSRRNKEVLTRNRRKVERWKETLEDVLRRVEKAVRELRKDAEDRL

SEQ ID NO: 15600 - protein, 59 aa, Artificial Sequence
  Synthetic
EDILREVEKKLKELLDRSRELSDEVRKRSDESNKEIKKELDRARDELRRLLERIEEELN

SEQ ID NO: 15601 - protein, 61 aa, Artificial Sequence
  Synthetic
DEIEKVLEEVERVVEEDERRNRKVLEENKRLVDEWDRRVREVLKDVKRRVDELDTRARRDL

SEQ ID NO: 15602 - protein, 59 aa, Artificial Sequence
  Synthetic
KEILDRVKERLERLLEESRELSERVKREIEETNERIARELERVMETLKKLLKDIEDELK

SEQ ID NO: 15603 - protein, 61 aa, Artificial Sequence
  Synthetic
KEAEDVLKKVDTDVTRDDEDNRKLLEDNRRSVEEDERRNRRVLEEVEKRVRDLAERVKRDL

SEQ ID NO: 15604 - protein, 59 aa, Artificial Sequence
  Synthetic
REILKRVTEELERLLAESERLSEEAEERVRRSDDTSRRLSEEVRKELEELLRRIEERLR

SEQ ID NO: 15605 - protein, 61 aa, Artificial Sequence
  Synthetic
REVEEVLKRVKETVEKDREDNTRVLERNRESVKEDDDRNRKVLKRVRDEVRKLLEEAKRDL

SEQ ID NO: 15606 - protein, 59 aa, Artificial Sequence
  Synthetic
EEILKRIEEELKRLLEESRELSKEVEDRVRKSDKKSRDLSEKVKKDLKELTDEIRKRLK

SEQ ID NO: 15607 - protein, 61 aa, Artificial Sequence
  Synthetic
SEIEDILERVREEVDKDRRKNDEVLRENERLVKKDDDDNAKADEDVRRKVTELEKRARREL

SEQ ID NO: 15608 - protein, 59 aa, Artificial Sequence
  Synthetic
EEILKRVAKRLKELLEESKRLSDEVTKRSRDTDEESERLSRKVDKEVKDLLKEIERELE

SEQ ID NO: 15609 - protein, 61 aa, Artificial Sequence
  Synthetic
SEVEEMEERLRKLDEDSRRLSEDVKRRLDKINKEIKDLLDDVRRKLKEMLDKLTKDLRDLK

SEQ ID NO: 15610 - protein, 62 aa, Artificial Sequence
  Synthetic
KRAEDKVRDVLRDNERTLKKDEDDNKRVLDEDEKRLREWEERARRVLEEVRRRLKELVEEVR

SEQ ID NO: 15611 - protein, 61 aa, Artificial Sequence
  Synthetic
REVDKAREDLRRVDDELRKILERVRRELEKLDKESEERSRRLARDLDRLLEELERDLKDNK

SEQ ID NO: 15612 - protein, 62 aa, Artificial Sequence
  Synthetic
REVERKVREVLKDNERTLRELRDTIRKVLEDNDKTLREDVRRNEEVLRRVDETLRELKKRVE

SEQ ID NO: 15613 - protein, 60 aa, Artificial Sequence
  Synthetic
SEVDKVKEDLDEVDKDSRRISREMEERLKELDKRSREISDRVVRELEKILKEIEDLLRDL

SEQ ID NO: 15614 - protein, 62 aa, Artificial Sequence
  Synthetic
KEARDKIRRVLEDNERTLREDIEDNRKVLEDNDKRLKDDERKNREVLKRVDETLKELDERVK

SEQ ID NO: 15615 - protein, 61 aa, Artificial Sequence
  Synthetic
DELRELEERLRRSVEEIKRDLKRIHDENREAVERSERKSKKILEELKREVEDVKRELREKL

SEQ ID NO: 15616 - protein, 59 aa, Artificial Sequence
  Synthetic
EKLVREIERRVRKMEEDVRELVKTIEKRSRDVIKKSEDILKRIKERVEELEKRVRDAVR

SEQ ID NO: 15617 - protein, 61 aa, Artificial Sequence
  Synthetic
DELRELLETLRDEVRKDDKRNEDIHRENRKRVEESRRRSEKILRDLREVVKRLEDELRKKL

SEQ ID NO: 15618 - protein, 59 aa, Artificial Sequence
  Synthetic
EELLKRIEKRVRDMIRRSRTLSARLEDLSRELDERSKRVVEDLKRRIDEAIKELEKEVE

SEQ ID NO: 15619 - protein, 59 aa, Artificial Sequence
  Synthetic
DETEEVAKKIKELIERSRELVKKVKEKIDRLNEEIEKLVREVEKTIKELTDRIEELRKR

SEQ ID NO: 15620 - protein, 58 aa, Artificial Sequence
  Synthetic
EEMKKLLDDLRKAVDESRRRSEEILKENRKRVEKWREDLRRLLEKVKEDLDRIRERLR

SEQ ID NO: 15621 - protein, 59 aa, Artificial Sequence
  Synthetic
SEVEEAKKTLDELNRDIAKKVEDVEREIKRMIEESERLTREVEERIRRLTKKIEDLRRG

SEQ ID NO: 15622 - protein, 58 aa, Artificial Sequence
  Synthetic
ERVKKILEENKRDAERWKRRLKKLLDDVRRLVKEDDDRNEELLREVTERVRRIEEKLD

SEQ ID NO: 15623 - protein, 59 aa, Artificial Sequence
  Synthetic
SEVEKVKEELKKLNKEIADSSDEVDKDIERLIRESRKLTEDVRREIKRLIERIDELRRA

SEQ ID NO: 15624 - protein, 58 aa, Artificial Sequence
  Synthetic
EEAKRILDENKKLVREWEEKSRAVLEKVKKLVKRDDDENKKLLDDVKKLVDEMRERAR

SEQ ID NO: 15625 - protein, 60 aa, Artificial Sequence
  Synthetic
DLEREIRKIIEEAKKELERVNDEIRRIIEEMRRRSEESNKRIREIIERARRRLEELIRRG

SEQ ID NO: 15626 - protein, 58 aa, Artificial Sequence
  Synthetic
EEVKKLLTDLKRLVDEIRKHNKRLLDELRKEVEKSERENRRLLEEVRRTVDEMRERAR

SEQ ID NO: 15627 - protein, 60 aa, Artificial Sequence
  Synthetic
SAEDKARKIAEDAKKEAEDSNRDAHRIAEEAKRRARKINEEARELIERAKKELTRLRREG

SEQ ID NO: 15628 - protein, 58 aa, Artificial Sequence
  Synthetic
EEAKKLLDELRKAAEDIRRNNEEALKDLRRAAEEIRRHNEELLRRAREAAKKARDDAE

SEQ ID NO: 15629 - protein, 60 aa, Artificial Sequence
  Synthetic
SAEEAVKRVEELVRRVKERNKRLVEDVEREVRRVKKRSEETNRRVKKLVERVKEDLDKRV

SEQ ID NO: 15630 - protein, 59 aa, Artificial Sequence
  Synthetic
KDKLEEVLREVRDRLADVERKSERVVEEVERLLREVVRKNEDVLRRIEELLRDVEEKAR

SEQ ID NO: 15631 - protein, 60 aa, Artificial Sequence
  Synthetic
SVEELVREVEKRARKVKRDSDKTNKDSTKLVKEVKDRSRRTNEEVKKEVERVKEDLEKRV

SEQ ID NO: 15632 - protein, 59 aa, Artificial Sequence
  Synthetic
EDKLKEVVDRIRKLLEDVKRENEDVKRRSRELAERVREENDKVSKEIRELLEEVERRAK

SEQ ID NO: 15633 - protein, 60 aa, Artificial Sequence
  Synthetic
SAEEMREEVKRLVDKNRKDNREVEKKSTRLAEDVKRKSEETNRKIREEVERVKKDLEERV

SEQ ID NO: 15634 - protein, 59 aa, Artificial Sequence
  Synthetic
EEKLKEVLDEVRRLIKEINDHSREVSKTSEKLLRDVLKKNEDVLREIERLLEEVRRRIK

SEQ ID NO: 15635 - protein, 60 aa, Artificial Sequence
  Synthetic
REVEEITKEIREMNEESKRLLEEVREKIERLSRESNRLLEDSKREIDEAIRRVEELLDKE

SEQ ID NO: 15636 - protein, 56 aa, Artificial Sequence
  Synthetic
KDIITEIERTNDETEERVRDIERRIKESSDRNDKRAKEISERIKRLLEEVDKKVKE

SEQ ID NO: 15637 - protein, 60 aa, Artificial Sequence
  Synthetic
DLEELVKEVERRVRRNKTETDRLVEEVERSVRENRRRIEELVRRVEKEVRRIKEDLKRKL

SEQ ID NO: 15638 - protein, 59 aa, Artificial Sequence
  Synthetic
KDVLEKVAREIKRLIEESNRLDKEVEDEVREMSKDVNRELERIAEEIEKVLRDVERKLR

SEQ ID NO: 15639 - protein, 57 aa, Artificial Sequence
  Synthetic
SLEELLKEVKKLVEDVHRKNKKNVEDVRRLVERLRKENEENVEEVRREVKKVKEEIG

SEQ ID NO: 15640 - protein, 56 aa, Artificial Sequence
  Synthetic
LEEVRRRVEELVTDVDRSSKENHRRIRKVVREVERTTEENHRRIRDIVRRVREEAK

SEQ ID NO: 15641 - protein, 56 aa, Artificial Sequence
  Synthetic
SEIEKAVRELEELVKDNERKSKKSVEDSERIVKEIRDRVRRVVERVRKVVEDIARA

SEQ ID NO: 15642 - protein, 59 aa, Artificial Sequence
  Synthetic
DDELRKVVERARDLIRKIREESKRSHDRITKLAEDIKRELEKIERRLEKLAEELERKAR

SEQ ID NO: 15643 - protein, 56 aa, Artificial Sequence
  Synthetic
SEVDELRKEVEEMVKRNKDETDKSVKESKEIVDEIRKRIKEVVDEVRRFVEDIRRE

SEQ ID NO: 15644 - protein, 59 aa, Artificial Sequence
  Synthetic
SRALEDVARRLRELLKRINDKTRESHKEIKRLADEIRKKLEDIVRELEKLLREIKERAR

SEQ ID NO: 15645 - protein, 56 aa, Artificial Sequence
  Synthetic
SEVDEVRERLERVVRRIEREVEKSERDSERIVEKNKRDTDRVDREIEKVVKKIRDR

SEQ ID NO: 15646 - protein, 59 aa, Artificial Sequence
  Synthetic
SRALEEIEKRARELLKRITELLRESHERIKRLAEEINKKTEKVVRDIRKLLKEIEDKVT

SEQ ID NO: 15647 - protein, 57 aa, Artificial Sequence
  Synthetic
SEIERLREELERVVRAIERTVTESVRESKEMVDRNKRATEKSVRDSEDMVREIEERG

SEQ ID NO: 15648 - protein, 59 aa, Artificial Sequence
  Synthetic
SRELERVAKEARDLLREIKKLLDESTETIRRLVKEINDETERSHRKITELAKRLKEEAK

SEQ ID NO: 15649 - protein, 56 aa, Artificial Sequence
  Synthetic
DEVRELVEEVERVVKRNKDESKKSEEESREIVREIEKRVEDLVRTVEEVVKEIERK

SEQ ID NO: 15650 - protein, 59 aa, Artificial Sequence
  Synthetic
SRELEKVADTLRKLLKEINEKLERSVRRIRELAKEIKDELRRIEEELRKLAKELDDEAK

SEQ ID NO: 15651 - protein, 59 aa, Artificial Sequence
  Synthetic
DRTREVMERIERLLEDSRRKTDKVRREIRKLLEDVHDKTRRVAKEIRDLLDEIRRLLES

SEQ ID NO: 15652 - protein, 55 aa, Artificial Sequence
  Synthetic
EEVVKKARKKVRENAEEAEEVRRRIRRSVEENRKELRRLEKELKDVLDEIRERVR

SEQ ID NO: 15653 - protein, 59 aa, Artificial Sequence
  Synthetic
RELEEVRKDIERLLKEVEDTNRRAKERVKRLLEEVHDDTRRAVERIRKLLDEIRKLLEG

SEQ ID NO: 15654 - protein, 55 aa, Artificial Sequence
  Synthetic
EEVVKEIEKMLEKIARHARKSDKEAKESVEDNRRRLEKVRKEVEDMLDEIRERAR

SEQ ID NO: 15655 - protein, 59 aa, Artificial Sequence
  Synthetic
DREKEVADRIRKLLEEIREESERVAKEIRELIKEVHKRTKEVAEEIRRLLKEVEELLRN

SEQ ID NO: 15656 - protein, 55 aa, Artificial Sequence
  Synthetic
EEVVKEIERRLRENERKLRELEKEIKKLVEDNRTRLRELEDEIRRVLKKITDEVT

SEQ ID NO: 15657 - protein, 57 aa, Artificial Sequence
  Synthetic
SELEKAVEDSRRLDRRVEETLRDVTRRVRETNKEVEDMLEEVRERAERLLREIEEKL

SEQ ID NO: 15658 - protein, 59 aa, Artificial Sequence
  Synthetic
EDELRKVIDENRKSVETIEEELRRVEKEDEDTLREIEEKLRKAIEELEKKLKEILDRLR

SEQ ID NO: 15659 - protein, 59 aa, Artificial Sequence
  Synthetic
REREELVERVRELLKEVEDRDREMVERSERLNERIRERDKEVEDRSRKLDEDIERLLRA

SEQ ID NO: 15660 - protein, 55 aa, Artificial Sequence
  Synthetic
EEVLKEVKDAVDTLKKHSEDVIRKDEESVRDLRRHSEDVLRKNKEMVDDIKAKAE

SEQ ID NO: 15661 - protein, 63 aa, Artificial Sequence
  Synthetic
DEEDKLREVLKDVERRVREMLRENNELIREVAETSERLLRENNELIERVRKEVTRLLKELEKV

SEQ ID NO: 15662 - protein, 55 aa, Artificial Sequence
  Synthetic
REIVETIRKILREIEEHAERNKTRLEEENKKVREHVERNKKDLEETLKEVEDRAR

SEQ ID NO: 15663 - protein, 63 aa, Artificial Sequence
  Synthetic
SKEDKLREELKEVEKTVRELLKRNNELIERVREEVERRLEENNRLIKEVKDRIDDLLRKLKDD

SEQ ID NO: 15664 - protein, 55 aa, Artificial Sequence
  Synthetic
REIVKTIKEILDEIRRHLERNKDRLEKELTRVRETAEKNKRDLEKVLEDVDRKAK

SEQ ID NO: 15665 - protein, 60 aa, Artificial Sequence
  Synthetic
DEAEKLEREVRKELEENREELERSTEESERLLKHNEDELRKSEEESKKLLREVEKELRRV

SEQ ID NO: 15666 - protein, 59 aa, Artificial Sequence
  Synthetic
KRVLDEVVKEIRRLIEEVKRTTKEMNKKIRKLFEESNRKLEEAHRDIRRKAERVKRELK

SEQ ID NO: 15667 - protein, 60 aa, Artificial Sequence
  Synthetic
KELDEIREEVDRVLRENERRLRTVKKEARDVLEHNRKRLEELRRKIEEVLKEIEEELKRV

SEQ ID NO: 15668 - protein, 59 aa, Artificial Sequence
  Synthetic
EEVLRRVLERIRRLIERVKERTKRMTDDMRRLIEESNDKLRRAEERIRKLLEEVKRTLK

SEQ ID NO: 15669 - protein, 60 aa, Artificial Sequence
  Synthetic
KKVEDIKREAEKVIKESEESIRRNERELDEVIKESERSIRRNERELERVLKELRDSVARL

SEQ ID NO: 15670 - protein, 55 aa, Artificial Sequence
  Synthetic
DRIREELKKVADEIRETNKRIHEESKRVVDEVRRTNEEIHKRSAKVVKDIKDKIK

SEQ ID NO: 15671 - protein, 60 aa, Artificial Sequence
  Synthetic
EEVERITEDAKRVIDESRKTIKRNEDDLRRVIEESRETVERNRKRLEEVLRELEERVRRL

SEQ ID NO: 15672 - protein, 55 aa, Artificial Sequence
  Synthetic
KRIEEELKRVAEEVKKINEDIHRRSKEEVDRVREINEKIHRDSERVAEEVRRRIK

SEQ ID NO: 15673 - protein, 57 aa, Artificial Sequence
  Synthetic
EELERLKEEVEEIVRRLKRELERIEEEIAKMVRDSEKSLEEDEREVRKVVEELRRRG

SEQ ID NO: 15674 - protein, 59 aa, Artificial Sequence
  Synthetic
EEILRRVKEEVEKVARDIKAIIEKVAREVKEVLDRIREVNKRAHEETRKVADEIEKRAK

SEQ ID NO: 15675 - protein, 56 aa, Artificial Sequence
  Synthetic
DEVERIAKELTDVLDRIRKAVETDKEEIKRVLKEIEEAVRTNEEKLKDALRKIREG

SEQ ID NO: 15676 - protein, 59 aa, Artificial Sequence
  Synthetic
ERALERVEEKARELVRRVDELLRRSHERTKELAERVRRLLKKSDEETERLARDVERKIK

SEQ ID NO: 15677 - protein, 56 aa, Artificial Sequence
  Synthetic
SEVERITERLKEVLKEIKELVETNSEKLKRVLEEIKKAVEDNTRTIKKVLEEITRA

SEQ ID NO: 15678 - protein, 59 aa, Artificial Sequence
  Synthetic
EEMLKRVEDEARRLTERVRKLIEDSDRETEKLVRRVRELVKRSHEKVKELVDRVRKRIE

SEQ ID NO: 15679 - protein, 56 aa, Artificial Sequence
  Synthetic
SEVERIAEEVKRVLEKIRRDVEENRKRIEEALKRIEKELRDNERRLREVLDEIRKR

SEQ ID NO: 15680 - protein, 59 aa, Artificial Sequence
  Synthetic
EDALRAVEEEIRKLEDEVRRLIETSHKEVEDLAKEVTDLLRESNERTEDLRREVDAKRR

SEQ ID NO: 15681 - protein, 64 aa, Artificial Sequence
  Synthetic
SDEERLLRTITRVLEENKKSVDDDLKKNEDVLDENRRRVERWEEALRELLKRVEDKVKDLKKDG

SEQ ID NO: 15682 - protein, 56 aa, Artificial Sequence
  Synthetic
TDEIRRVLEKVKEELDRTDEKSRDLSRKVRDRIRESNREIEKLLEEVRERLERETK

SEQ ID NO: 15683 - protein, 64 aa, Artificial Sequence
  Synthetic
READELRTRAEKALRDNRESVERLKRELDRVLKENERTVRELKERVKEVLKDVDKKVKDLKKEG

SEQ ID NO: 15684 - protein, 56 aa, Artificial Sequence
  Synthetic
REEIRKVLEDVRREVEETDDRIRKVLERARRESEKVDRELKKELERVRKELEEETK

SEQ ID NO: 15685 - protein, 59 aa, Artificial Sequence
  Synthetic
DRERRVLEELRKLSEDSKRLLERIRERMRRLAEETKRRARDILREVEELSRRVKELLDG

SEQ ID NO: 15686 - protein, 55 aa, Artificial Sequence
  Synthetic
EEVKDDVRRSSEEVKEEVERLIREAKKSTDEVRELLKELEKRLRESIEESKRKAE

SEQ ID NO: 15687 - protein, 57 aa, Artificial Sequence
  Synthetic
EEVKRMEDRLEEVAKRADEESKKVMDELEKIVRDVLRESKRLTEELRRIADRVRKEL

SEQ ID NO: 15688 - protein, 59 aa, Artificial Sequence
  Synthetic
KKELDRIEKRVREIKKRSEDSVRTIRERVRDAKRKLERSVEEDKREVKEIKERLEREAR

SEQ ID NO: 15689 - protein, 57 aa, Artificial Sequence
  Synthetic
SEVDDLKRKLDEVVRRAKEESKEISERLEEIVRDAERLLKELHEEDERIVDRARKEI

SEQ ID NO: 15690 - protein, 59 aa, Artificial Sequence
  Synthetic
RDKLEKIRDAVRKVKEELERSLEKDRKRVTEIEEKLKKLVEENRRTSKRVKEELEEKVR

SEQ ID NO: 15691 - protein, 60 aa, Artificial Sequence
  Synthetic
RELEEIKKRVEDIMRRIEDLLRENEKKIDKVRKDIRKSLEENKRKVEEVRKDLKRLLDER

SEQ ID NO: 15692 - protein, 55 aa, Artificial Sequence
  Synthetic
EEVKKEIERLAKKLEEELERSNRESDRLVREARKHNEESDRRSEELARRVRERLR

SEQ ID NO: 15693 - protein, 60 aa, Artificial Sequence
  Synthetic
KREEDVKRDLKRVADESRKSDEDIKRRLDRLVKEIRELHKKTTDELKKVADEVRDRLRKV

SEQ ID NO: 15694 - protein, 55 aa, Artificial Sequence
  Synthetic
DELREDVKRVEDENRTSLREIKRAIEKVLDESRKLVEENRRRAEKIIKEVEDTLR

SEQ ID NO: 15695 - protein, 60 aa, Artificial Sequence
  Synthetic
REEEEVTEELKRLADKSRKSDEDIERTDRRVTEEIERLHEETTRELEKVRRDVDRELKKV

SEQ ID NO: 15696 - protein, 55 aa, Artificial Sequence
  Synthetic
DELKKEVRKILEENKRSLERIRRHSTRVEEKSRKLIKENDDRLKKVIEDVRRKLK

SEQ ID NO: 15697 - protein, 60 aa, Artificial Sequence
  Synthetic
SEKDKVTKELEDVARESRESDKEIKRELDEVVEESERLLREIRRRLEKVAEEVRRALEKV

SEQ ID NO: 15698 - protein, 55 aa, Artificial Sequence
  Synthetic
EELKRRVEEIIRENEESVRRIAKRADDSNREIERLVDEIRRRAEEAIRRVTEKVR

SEQ ID NO: 15699 - protein, 60 aa, Artificial Sequence
  Synthetic
KEEDDVRRKLEKVVREIDKLHKESTERDRKVREDSEETDRRIKEELKKVVKEVRDRLREV

SEQ ID NO: 15700 - protein, 55 aa, Artificial Sequence
  Synthetic
EELKDEVRKATEKSEDLVRRNEEHSRRVIEENERTLKDIADEAERVIKEVEDRLR

SEQ ID NO: 15701 - protein, 60 aa, Artificial Sequence
  Synthetic
REDEEVTKELEEVIREIEELHERSTRKLKEVVDRSRELLDRVRRRLKEVVDRIRELLERV

SEQ ID NO: 15702 - protein, 55 aa, Artificial Sequence
  Synthetic
EELRKRVEEAIRKSEELVKENTERAKKSNEELERRVRELEERAKRAIEEVKEKIR

SEQ ID NO: 15703 - protein, 60 aa, Artificial Sequence
  Synthetic
SREEDVDRKLDEVIERSRRIDEEILRRDKEVVDEIRKLHKESTDRLKEVVDRVDKELKEV

SEQ ID NO: 15704 - protein, 55 aa, Artificial Sequence
  Synthetic
EELKKKVTEAIEENRESVEEIRRHSEEVKKESEKRVKENRDRARRAEERVEEMLR

SEQ ID NO: 15705 - protein, 60 aa, Artificial Sequence
  Synthetic
DREREVKKRLDEVRERIERLLRRVEEESRRVAEEIRRLIEEVRRRNKKVTEEIRELLKRL

SEQ ID NO: 15706 - protein, 55 aa, Artificial Sequence
  Synthetic
KELREELKKLERKIEKVAKEIHDHDKEVTERLEDLLRRITEHARKSDREIEETAR

SEQ ID NO: 15707 - protein, 60 aa, Artificial Sequence
  Synthetic
DEEEKITRDLEKVEDEIRRLLEEVRRLSKKVKEEITKLLEDVNRESEKAVRKVRETLKRL

SEQ ID NO: 15708 - protein, 55 aa, Artificial Sequence
  Synthetic
ERLRKRVTDVIRKLEEVLKDIHRHDKEAIEEAERRLEDNHRRNRRVLEELKRRAD

SEQ ID NO: 15709 - protein, 60 aa, Artificial Sequence
  Synthetic
SEEETVEELVRRAEEKSRRILEDSKKKVRDIERENDEILKRSRDRVKKAEDDLRRVVEKR

SEQ ID NO: 15710 - protein, 55 aa, Artificial Sequence
  Synthetic
ERILRELERVVEEIDREHERTKEELKKVADESRKAHRESERDLERVIREVRERLR

SEQ ID NO: 15711 - protein, 60 aa, Artificial Sequence
  Synthetic
SEVERVRKTVEEIKEKNERILKTSKDEVRRILEESERMLEESKKRVDEVREEAADVVRKR

SEQ ID NO: 15712 - protein, 55 aa, Artificial Sequence
  Synthetic
DRILEKLEEAAKRSDELHKRSRDDLRRVAEEIKKLHEETRRKLKKVVDEIRKKLK

SEQ ID NO: 15713 - protein, 61 aa, Artificial Sequence
  Synthetic
STLEEVRERVDRVKKKLKKLLEEVTEINERSKKEIDEILKESEDRVRKVKEDLKRVVKEDK

SEQ ID NO: 15714 - protein, 59 aa, Artificial Sequence
  Synthetic
EEVLERVLRELEELTRRVEKEIRDLLKRIEDSSRRVRELATESRKKLEDLVREIKERLT

SEQ ID NO: 15715 - protein, 59 aa, Artificial Sequence
  Synthetic
SSEEKVREEVERVREEITRLLRENEDTVRRVDEKAEKALRENKERVDRLREEVRKLLEK

SEQ ID NO: 15716 - protein, 59 aa, Artificial Sequence
  Synthetic
DDFVRKVTEELKKVTDRIRKLLEESRKHTERVRREAEKLLKEIKDETKKVEEEVRRRAK

SEQ ID NO: 15717 - protein, 59 aa, Artificial Sequence
  Synthetic
SSREKIKDDLRKAVEENRRLLREVRELLREMLERDERILREIERRLDEARKRLEEVARN

SEQ ID NO: 15718 - protein, 58 aa, Artificial Sequence
  Synthetic
RAVEELKKELRRLEEESRRAVEDLKRLLDELKERTDRVVKKLDETLRKLKEDVDRKAK

SEQ ID NO: 15719 - protein, 60 aa, Artificial Sequence
  Synthetic
REIDELRKELDEIRKRIEKVIEELKRHLDEVDKRAEDLAKELDDLTKTIERDAERRIRED

SEQ ID NO: 15720 - protein, 59 aa, Artificial Sequence
  Synthetic
DKVIREVEERVKRIKEDVDRVLEDNSREVERVKRKVDKMLKRNKDEADRIRKKMDDDLR

SEQ ID NO: 15721 - protein, 60 aa, Artificial Sequence
  Synthetic
SVIERLKEELKKIEEDARDMAKKLNKETEDILRRARKLARELEKHLEDVKRKIDELIKED

SEQ ID NO: 15722 - protein, 59 aa, Artificial Sequence
  Synthetic
KKMIEEVERDVRRIKKEVDRLLEENTERIEEIKKEVDELLKRNTDEVEKVKKKVDEDRK

SEQ ID NO: 15723 - protein, 59 aa, Artificial Sequence
  Synthetic
KIEEDLERSLKKSEDELKELRDRLRKSNKEVTDDAERIKKEVEDSNREVEKRVRDLERR

SEQ ID NO: 15724 - protein, 59 aa, Artificial Sequence
  Synthetic
SEEARKVLEENEEVVRRIVKKVEDILDDHRRVVKEVRDRIERLLKEHKKIVEDADKDLT

SEQ ID NO: 15725 - protein, 60 aa, Artificial Sequence
  Synthetic
REEEEVAKKLERAAEESRRLHEESKRDHERATDEIRRKAEATLRELKRVIDEIERLADER

SEQ ID NO: 15726 - protein, 55 aa, Artificial Sequence
  Synthetic
EEIRRRVETLERENRKAEEESRDKVRKSERRLEELNKRHEDLVRELEERLERKRK

SEQ ID NO: 15727 - protein, 60 aa, Artificial Sequence
  Synthetic
DEEEKVLRELEEVIRTSRRLHKRSLEELDRVLEESKALHRESKRALEDVTREITKLADDR

SEQ ID NO: 15728 - protein, 55 aa, Artificial Sequence
  Synthetic
ERIRKLVDDLRKENEKALRESKKRVEEIRRRNEEAIKDSKKDVEDLERDLERKRK

SEQ ID NO: 15729 - protein, 60 aa, Artificial Sequence
  Synthetic
SDEERVLEELKKVIKESRDLHKESLDDLRRVIEKSRRLHEESLERLRRAIEEIERLMDER

SEQ ID NO: 15730 - protein, 55 aa, Artificial Sequence
  Synthetic
EEIRDLVRTLEEDNKRMEERSRRTVRKLEKENDDARKESERLVEELERRLEEKRR

SEQ ID NO: 15731 - protein, 60 aa, Artificial Sequence
  Synthetic
RDVEEVKKRSDTTLKRIEELIRRVNERSKKSIKEIRDRAKEVEDEVRELARKIEEDARRR

SEQ ID NO: 15732 - protein, 59 aa, Artificial Sequence
  Synthetic
DEVVRELEKINDKSRKRVEDAVRSNEKLLEDSERDIRRVIERLKKLLEDLKRKLEEIER

SEQ ID NO: 15733 - protein, 60 aa, Artificial Sequence
  Synthetic
SDAERVMEESRRTIEKIKKDAKEMNERSRKTVDEIRERLERLLRELERIAEEIRRELEKR

SEQ ID NO: 15734 - protein, 59 aa, Artificial Sequence
  Synthetic
EEFVRELKKLNDKSRKDVEDLKRSNEEINEDSKRKVEEIIRRLEELLKEIRRELEDVER

SEQ ID NO: 15735 - protein, 60 aa, Artificial Sequence
  Synthetic
SVEEDLKRLVDEIRRRVEKVKRDLERIVDENRKRVEESKEESKKSVEEIERRVREAAKRI

SEQ ID NO: 15736 - protein, 59 aa, Artificial Sequence
  Synthetic
EKVADEVRKRLRKMIRDLEEVAREVKRELERLHEETERSSRDAKRRSDKMARDLERTEK

SEQ ID NO: 15737 - protein, 60 aa, Artificial Sequence
  Synthetic
SSEEKLRELVKRIKRRVEEIIRRLEESVERDRDEVRRSKERLEALVEEIRRRVDDIEKRI

SEQ ID NO: 15738 - protein, 59 aa, Artificial Sequence
  Synthetic
EKAVREVEEELRDMERKLEKVAEEVTRRSKEVTEKLRESSDRVEKELRRIIEELERVAK

SEQ ID NO: 15739 - protein, 60 aa, Artificial Sequence
  Synthetic
SVREDLKRLVKEIEDEVRKSKKDLDDSVREDKREVRESKEDSKRSVKRSEEEVRKIKKRT

SEQ ID NO: 15740 - protein, 59 aa, Artificial Sequence
  Synthetic
EEVAKRVRELLEEIMRRLRKTSEEARRRSKKITDDLRESSKKVREDSERLRKRLEEEAK

SEQ ID NO: 15741 - protein, 60 aa, Artificial Sequence
  Synthetic
DAERKITRLLEEIRRESKRSSEEIKKSLKENEDEVRRVVEEIRKRLREIEKEVKEVLDRL

SEQ ID NO: 15742 - protein, 59 aa, Artificial Sequence
  Synthetic
EKLVEEVLREVKRIIEENRTLSERVKEHNEKSHRESEELAKRVKELLKEIERDIRRLEK

SEQ ID NO: 15743 - protein, 55 aa, Artificial Sequence
  Synthetic
SDAERVLKESKESLEELERRVTEALKRSRDSLRRLKEVADEARRRLEEVLERIAR

SEQ ID NO: 15744 - protein, 59 aa, Artificial Sequence
  Synthetic
SEVKERLKRSLEETEKRVREVEERLKKTVEDTRKVVEDIERELERLLREVEEVVRRIEK

SEQ ID NO: 15745 - protein, 55 aa, Artificial Sequence
  Synthetic
EEAERMLRESEASLRRIEKIVREALEASRRTVEELKKVVERVLREVRKLIEEIEK

SEQ ID NO: 15746 - protein, 59 aa, Artificial Sequence
  Synthetic
DEVRERLKKTVEDSKRVVEKAEEDLRRSLEDTERLVREASRRLRDLLRELRRIVEEIKR

SEQ ID NO: 15747 - protein, 55 aa, Artificial Sequence
  Synthetic
SEDEKALRESKKTTDEIRKRVTEMEKRSREVVKEIRDIIERVLREVRRVLEEIRK

SEQ ID NO: 15748 - protein, 59 aa, Artificial Sequence
  Synthetic
SEAKKRLKDSLDRTRKTVEEMTRRLEKTVKETEDLLREARERLEELLRELERVADEKRR

SEQ ID NO: 15749 - protein, 55 aa, Artificial Sequence
  Synthetic
SEDEKVLRDSRKVLREIEEVVKEVLKRSKKLVEELEDIARRVLKESEDSNKEARD

SEQ ID NO: 15750 - protein, 59 aa, Artificial Sequence
  Synthetic
DEVERRLRKTVRDTKEVVDRAREKLERTVRTTEETVKEIEKRLEESLRRSREDVKEREK

SEQ ID NO: 15751 - protein, 60 aa, Artificial Sequence
  Synthetic
RVEDALRKLLDDVRRLVEEAERRLRTSNDKSRRLVEEAKRRLEESNERSEKLVRDVRRRI

SEQ ID NO: 15752 - protein, 59 aa, Artificial Sequence
  Synthetic
SKVVEEVLKELEELIKTAKKIIEDVLRASEDTIRRLEEIIRKVEEDSKRIIEEIERAAR

SEQ ID NO: 15753 - protein, 60 aa, Artificial Sequence
  Synthetic
SAEDKLRKLLDDARRTVKEVEERLKKLNKKLEEDVKRVKRELRESNKKSRELVEKVKREV

SEQ ID NO: 15754 - protein, 59 aa, Artificial Sequence
  Synthetic
SEVVEEVLEELKKLIETVKRRAKEVLDRSEETIREIRKRAEDVLRESERIIEDIERMTR

SEQ ID NO: 15755 - protein, 60 aa, Artificial Sequence
  Synthetic
KVEKRLTDLLKTVADEVKRVEDELRETVRESKEVVDKSRRDLERTVEESEKTVKDAERRV

SEQ ID NO: 15756 - protein, 59 aa, Artificial Sequence
  Synthetic
EEVVKKVEKEIRELLERLKEEADRVRERSKKILTDLKKSSEDVKRESERMLKKLEDEIR

SEQ ID NO: 15757 - protein, 60 aa, Artificial Sequence
  Synthetic
SVEERLEDLLREVTETLDTSRRRLEKLDREVDKKVKEVEKRLRETLKESEDTVRDVERRV

SEQ ID NO: 15758 - protein, 59 aa, Artificial Sequence
  Synthetic
EEVARRVEKELEDILRKLRKSSEEAERRIEEMLRRLDKVVKEMLKRSRDLLRTLEETTK

SEQ ID NO: 15759 - protein, 60 aa, Artificial Sequence
  Synthetic
SIREDVERLAEELDRKSREIATRAKRELDEILRKDKEISDRARKELEEILKKLKEIADRD

SEQ ID NO: 15760 - protein, 59 aa, Artificial Sequence
  Synthetic
KEVEKRLDDALKRNAEEVEDVKRKLKDVLREVERTVRESEKDLRRVLEEVERAVREIRR

SEQ ID NO: 15761 - protein, 55 aa, Artificial Sequence
  Synthetic
SEVDEVLKRSRDVLKRIDEIVKKVLTDSKRVLEDLRRIVKEVLDESKKVLEEIRK

SEQ ID NO: 15762 - protein, 60 aa, Artificial Sequence
  Synthetic
AEEVERAMRKSSDDLRRKLEEVERRLRKSSEESKKVLKDAEREIRRSSDELRKVLEDIRR

SEQ ID NO: 15763 - protein, 55 aa, Artificial Sequence
  Synthetic
SEVEDVLTKSRKVLKEIEEIARKVLEESKRVLEEIRRVVEEMERRSEDVLRELRR

SEQ ID NO: 15764 - protein, 60 aa, Artificial Sequence
  Synthetic
ADEVRDEVRKSSEELRRVLEEAEERIRRSSKESKELLKRVKERIEELSRRLEKVLREIEK

SEQ ID NO: 15765 - protein, 59 aa, Artificial Sequence
  Synthetic
DAEDELKKAEDRLRKSDEEAKKSIEDVKRELRRLLEESKKEIEKLIEELRRLLERAKEK

SEQ ID NO: 15766 - protein, 59 aa, Artificial Sequence
  Synthetic
EEVVERVLRKVERLLEENERLVKEVEDELRKLLEDLKRSSKKVRDEVKELAKRLRDEVR

SEQ ID NO: 15767 - protein, 59 aa, Artificial Sequence
  Synthetic
SAEERIEEVKERLRRSDEEAKRKIDRLVEELRRLLEESKKEAEKVKKELRKLLEEVKRK

SEQ ID NO: 15768 - protein, 59 aa, Artificial Sequence
  Synthetic
EEVVKRVEDELRRLLEENKKLVDDILDEVRRLLEELEKSSRKVKEDLDRLLEELRREDK

SEQ ID NO: 15769 - protein, 59 aa, Artificial Sequence
  Synthetic
SAAEEVKKRITDLLRKDEEVVKRASEAVERLLEDDKRVVEDVRREIEEILRTLEKVTRE

SEQ ID NO: 15770 - protein, 56 aa, Artificial Sequence
  Synthetic
KDDVKRAEDEVRKSHKKVEDDLRRLKEEVERSLKDTEDKARRAKEEVERLLRESER

SEQ ID NO: 15771 - protein, 59 aa, Artificial Sequence
  Synthetic
DEDDRVRKEVEKMLRDDDRIVKEIEKRLKDLLDRDRKVVREVRELVEELLRRLEKVIKD

SEQ ID NO: 15772 - protein, 56 aa, Artificial Sequence
  Synthetic
EEDVDRLRREVDKSNKDTKKILDEVRKEVEDSLRKTKKIIDDALRRVDELLKEAER

SEQ ID NO: 15773 - protein, 56 aa, Artificial Sequence
  Synthetic
SVEERVEDIKRSNEESNKRLREEVEKIKEELKEINKRVEDTVREIEKRLEELLRRV

SEQ ID NO: 15774 - protein, 59 aa, Artificial Sequence
  Synthetic
ERVVEEIDKIAKEVNTRNKKVVDEIRKRAEEVKEESKESLKRLRKIAEEVLEELKKRAT

SEQ ID NO: 15775 - protein, 56 aa, Artificial Sequence
  Synthetic
DLAEEVRKDVEDLERTNEKVVRDIRKLLEDLNREHKRVSDEIRKRIEELKEKLKRI

SEQ ID NO: 15776 - protein, 56 aa, Artificial Sequence
  Synthetic
DDDVRRIKKRAEDSHDRVKKELDRIAKSNEELLRKTEEEVRRLLEELEEILRRTRK

SEQ ID NO: 15777 - protein, 59 aa, Artificial Sequence
  Synthetic
DEVEEALRRVEESNRRVKEEVERAVERVKRSDDDVRRLVEEMEREVRKLIDDIRRLAEA

SEQ ID NO: 15778 - protein, 56 aa, Artificial Sequence
  Synthetic
KDEITELKKHSERLLEEAERLVRDLKRHSDELLEEVEERLRRLREDLKRLLDEVET

SEQ ID NO: 15779 - protein, 59 aa, Artificial Sequence
  Synthetic
SAVEKAVRDVERTNEEIRRVVEEVRKEAEKTHRDIRRVVEEARETAERLLREIEELAKK

SEQ ID NO: 15780 - protein, 56 aa, Artificial Sequence
  Synthetic
EEAVKRLKDENKKTLDEVREIVKRLAEENKRLLEEVEKTVRDLKRELEKLLREVAK

SEQ ID NO: 15781 - protein, 60 aa, Artificial Sequence
  Synthetic
KEVEDVVKEIEEVLDRLRKEVKKIKEDSDRLNEEIEKVVTDLVKELDRLLREIDDLIRKL

SEQ ID NO: 15782 - protein, 59 aa, Artificial Sequence
  Synthetic
DRARKTLEDLKRRIEELLRRVDETNERLKRHSDDLLRDVKRRLDEVRERIDRLLDKAER

SEQ ID NO: 15783 - protein, 61 aa, Artificial Sequence
  Synthetic
DEVDEAVKRLREILRRIREIVEKVRKESEDVNDEIRRIVEEVTKRSEDALRELRELIRRNK

SEQ ID NO: 15784 - protein, 59 aa, Artificial Sequence
  Synthetic
ERVREELRKVEEDIDRLLKEVTELNERLKRHSEKLLRDVTRENRRSKEAVTRILEEARR

SEQ ID NO: 15785 - protein, 60 aa, Artificial Sequence
  Synthetic
SEVEELLDRLREVNKRIREEVRKVTEESKKAIEEIKRIVDDMVDKVRKILEKLKELIRDN

SEQ ID NO: 15786 - protein, 59 aa, Artificial Sequence
  Synthetic
DKAREDLRRVKEHSERLLREVTKLNKDVEKELKELLDEVRERLKDLKRRIDKILEEAER

SEQ ID NO: 15787 - protein, 59 aa, Artificial Sequence
  Synthetic
SVRERVKDEMEKVLRDDKEVSKRVTDEARKVLEEHRKITDEVRRRSKELIRELKKVRDE

SEQ ID NO: 15788 - protein, 59 aa, Artificial Sequence
  Synthetic
EEVRRTVDEVRRRIDKSLEESKKLVEDISREITELLRRTTERNKESKREVDKILEDARK

SEQ ID NO: 15789 - protein, 59 aa, Artificial Sequence
  Synthetic
SIVERAEKELRRLLKEDEEVSDRVRKEVKRLLKEDKEILDDVRRRIEKILREIEEVARR

SEQ ID NO: 15790 - protein, 59 aa, Artificial Sequence
  Synthetic
EDVRRIIKEIKERVKKSLDESREIIERAKREVDKSLEESKKVAEDAKRRIERLLREVER

SEQ ID NO: 15791 - protein, 60 aa, Artificial Sequence
  Synthetic
SEVEKVVREVEKLIREIERHSKEVNKRSKEDIDRIREKIERAIRRVEELIRKVKEVTERG

SEQ ID NO: 15792 - protein, 55 aa, Artificial Sequence
  Synthetic
EDLDRIRERLERLKKRTKELLERDEREVERVERELEELIRDIRRKIEKLKRDIEK

SEQ ID NO: 15793 - protein, 59 aa, Artificial Sequence
  Synthetic
SDLEDVIKKIEELLRRVEERLRDAVRKIEELLRASDERLREINEESRELLRRVKELKDA

SEQ ID NO: 15794 - protein, 56 aa, Artificial Sequence
  Synthetic
RKLVDDIRKEVERIVEEARKLLERIKREVKESSERAERLHEEDRKRVEDALREVKK

SEQ ID NO: 15795 - protein, 59 aa, Artificial Sequence
  Synthetic
KEAEDVLEKAKRLLKRSDEVVEEANDESRRLLDKIRKLVDTVNEESKRLLDRVRELREA

SEQ ID NO: 15796 - protein, 56 aa, Artificial Sequence
  Synthetic
KDAVRDVEREVRRSSKRLKELHEEDKRRVRKILERLKRLHEKDRRDLEKVMKEVED

SEQ ID NO: 15797 - protein, 60 aa, Artificial Sequence
  Synthetic
DDLDEVIKDIERLLKESDDDVERVIREIKKLLDEVRKRVRDANEDSKRLLREVERLAEAG

SEQ ID NO: 15798 - protein, 56 aa, Artificial Sequence
  Synthetic
ERLVREIERRVRKSSEDLRRRLEEIRERVEDIERELRKLHEEDKKRVEDILTEVRR

SEQ ID NO: 15799 - protein, 60 aa, Artificial Sequence
  Synthetic
SEKERVVEEVRKKLEEIRRRTEEMIERVERLLDEIRRRNKELVERNKELNKRIAEIVRDR

SEQ ID NO: 15800 - protein, 56 aa, Artificial Sequence
  Synthetic
SELARDIKRKLEKILEDSERLVDEIRKRIEKIKRESDETVRESRESSRRLLEEVKR

SEQ ID NO: 15801 - protein, 58 aa, Artificial Sequence
  Synthetic
SEVERLLEDNRRTIREDEERNKRVVDTWRELTRRLEERIEKVLTDNKKTVEDLVRKRG

SEQ ID NO: 15802 - protein, 56 aa, Artificial Sequence
  Synthetic
DDELRKDLERLDEESKRASEKLEEEVRREIKRSKELIEEVERKVEEIDKRADERLN

SEQ ID NO: 15803 - protein, 58 aa, Artificial Sequence
  Synthetic
SEVERVLEKLKRDVEKNERDNRRVLKKLREDVKKDADDNRKVLEDLRRAVEELRREVG

SEQ ID NO: 15804 - protein, 56 aa, Artificial Sequence
  Synthetic
TKDLVDEARKVLETSKRLSDELKKEVEKMLRESREMSKRLKEEVDRILKEVRDKAR

SEQ ID NO: 15805 - protein, 57 aa, Artificial Sequence
  Synthetic
DELEEVIDRNRKSLKEIEERNKKVIEDLRRAIKEIEDRLKEVLDRVKKRIEDIERRV

SEQ ID NO: 15806 - protein, 55 aa, Artificial Sequence
  Synthetic
EELRKKIEDVDRKVRKESEDLKRELKKLLDEIRRKVRELEERAKRVEEEVDREAK

SEQ ID NO: 15807 - protein, 57 aa, Artificial Sequence
  Synthetic
SELEEVIRDNERSLKEIEDKNREVTKTVREEIKRIAKKLKEVLDRNRETVRDIERRV

SEQ ID NO: 15808 - protein, 55 aa, Artificial Sequence
  Synthetic
DELRRRIKEVDKEVEEKSEKLKREVKAVLDRVEKLAEEIRKKVEDVDRTVEEKAR

SEQ ID NO: 15809 - protein, 59 aa, Artificial Sequence
  Synthetic
KEMEDLEREVERVLKRLEELVRELLETVRRTLTRLKRKLDEKKKELDKVNEDLDRVTRE

SEQ ID NO: 15810 - protein, 55 aa, Artificial Sequence
  Synthetic
ERVVKKLEDAIEEIKRKLEKVHDEHRRTVEKIEEDIRRVEEEHRRTIKEIKEKLK

SEQ ID NO: 15811 - protein, 59 aa, Artificial Sequence
  Synthetic
SESERLAKEVEKKLKDAERLVKELHEEVDRMNRDLERKLREISERAKKTTEDVERVAER

SEQ ID NO: 15812 - protein, 55 aa, Artificial Sequence
  Synthetic
EEVIKKVRKDIEEITRKLERSNREHERTLREIKKRAEKVHEDHRREIDRIREELK

SEQ ID NO: 15813 - protein, 59 aa, Artificial Sequence
  Synthetic
RESEELEREVERVLRELEELVKRLHDDVRRVDEELDRKVRDLHKKVRDVLRRVEKLVRD

SEQ ID NO: 15814 - protein, 55 aa, Artificial Sequence
  Synthetic
DRVVDRLRRKIEEIARRLRKSNEDHRRSLKEIKDKLEESNERLRRALEEIAERLR

SEQ ID NO: 15815 - protein, 60 aa, Artificial Sequence
  Synthetic
SEKDEVITRVETELRRVKTEDRDVARRVKEELEDLKRRLERVIEDNERTLRELKKELKER

SEQ ID NO: 15816 - protein, 55 aa, Artificial Sequence
  Synthetic
EDVVRELEKLLRDWEKRSREVEEKLRRLLDELRETLKEIEKELRRLDKEIKERLR

SEQ ID NO: 15817 - protein, 60 aa, Artificial Sequence
  Synthetic
DREEKVKRRVEEELDRVRRTDDRVLKRVEERLREDEKRNEEVIRRNEKTLRELEKRLRDN

SEQ ID NO: 15818 - protein, 55 aa, Artificial Sequence
  Synthetic
EDVVRELEELLKRWKETSERVKRELTDLLRKSEETSKEVTKTLRELDKRIEDELR

SEQ ID NO: 15819 - protein, 59 aa, Artificial Sequence
  Synthetic
SREEDLKRKIDEVDKEWKKLTKKLEEEIREVEKEWRKLSKELERKIREVEKRLKEAKDR

SEQ ID NO: 15820 - protein, 55 aa, Artificial Sequence
  Synthetic
EEVIKTLRERVKDIHREDKEIIDRLREKAERIKEHDRKLLEDLKRTLDKLRREME

SEQ ID NO: 15821 - protein, 59 aa, Artificial Sequence
  Synthetic
DEREEIKKELDRIIRESEELVKKIKDVIRKLIEESKRLVEKIREDIKRSNDKLDEVTRR

SEQ ID NO: 15822 - protein, 55 aa, Artificial Sequence
  Synthetic
EEVKRRAEDLLRRSDEKSKRIAEEAERRLDRSDEESEKILRDNEDMVRKWREKEK

SEQ ID NO: 15823 - protein, 59 aa, Artificial Sequence
  Synthetic
DETEKITKDLEDLIREDEKLVKDARDTLAKSNEDSRRLVEDLRRLIKESNEELERVVRE

SEQ ID NO: 15824 - protein, 55 aa, Artificial Sequence
  Synthetic
EDVVRRLERLSEESRERLERILRDNKRRLDKSLEDSKRLVEKNDRDLKKWKEDRR

SEQ ID NO: 15825 - protein, 59 aa, Artificial Sequence
  Synthetic
DERETVREELKELIERLRDLNRKIEELLRRSNEEIRRLVEEIRRRLKEMNDEIRRVLKK

SEQ ID NO: 15826 - protein, 55 aa, Artificial Sequence
  Synthetic
DKVLKEAKELLDASEKHLRDLIETNERVLKRWEEELDKIAEENERVLRKWEEEAK

SEQ ID NO: 15827 - protein, 61 aa, Artificial Sequence
  Synthetic
SEREEVLKKIREMSKRDNEKNKRILDDVRRLSKEDNKDNDRLVEEHRRKITELEDRVRKEG

SEQ ID NO: 15828 - protein, 55 aa, Artificial Sequence
  Synthetic
EVLREVEELSRRDEKRSKEILEEVSKLSKDDEDRSRDLLRKAEEENRRLEEKLRK

SEQ ID NO: 15829 - protein, 61 aa, Artificial Sequence
  Synthetic
SEKETVLEDIRRMSKEDNEKNERIVERARRILEKIEEKNRRVKEEAKKMLERIKKLVKDRG

SEQ ID NO: 15830 - protein, 55 aa, Artificial Sequence
  Synthetic
RVVDEVRKRSEEDERRSRELLEEVRRAVKRVEDKSRTTVREIRERVKEVKKRLDD

SEQ ID NO: 15831 - protein, 60 aa, Artificial Sequence
  Synthetic
SEVEDVVRKVRKLVEKSTRDNKRVLEKVRKLVKESSDKNKKVLDEVEELIERLREKLERI

SEQ ID NO: 15832 - protein, 56 aa, Artificial Sequence
  Synthetic
RDALEEIRKRVEDNKRRSDESLEEIRRLVEENKRRSEKTLKEIREKAKRLKDEIDR

SEQ ID NO: 15833 - protein, 60 aa, Artificial Sequence
  Synthetic
SEVEKVEREVDEMVRDSTKENEDILREVRERLKKIKEDLDRTVTEVRRLLKELEEKAREV

SEQ ID NO: 15834 - protein, 56 aa, Artificial Sequence
  Synthetic
KDMLDRVREKVKRNKEESDKSLDEIRRIAEEVKRRIDELLKEIKKRAEELKRKLRK

SEQ ID NO: 15835 - protein, 60 aa, Artificial Sequence
  Synthetic
SEVEEVLKRARELVERSTRENRKILERARKMLEDARKTNEDVLRDVERLLDELRRELEKI

SEQ ID NO: 15836 - protein, 56 aa, Artificial Sequence
  Synthetic
KEVLDEIRELVKENKKRSDDSLREAEKRLRELKEESDKTLDEIRRKLEKLKEEIDR

SEQ ID NO: 15837 - protein, 60 aa, Artificial Sequence
  Synthetic
DEVETVRKDVERLVRTSNDENRRILETARKLIKEVREKNKEVTDRVRDLLRRIEEEVKKV

SEQ ID NO: 15838 - protein, 56 aa, Artificial Sequence
  Synthetic
ERILEEIRRRVEENKKRSDESLKEARELLRDVERESDETLKEIEEEARRLKEEIDR

SEQ ID NO: 15839 - protein, 59 aa, Artificial Sequence
  Synthetic
DEVKKVVDEARKLVEDDKRTNEEVLRRTRELLERDERKNEEAVKRIRDLLKEIKKLVEA

SEQ ID NO: 15840 - protein, 56 aa, Artificial Sequence
  Synthetic
EELLKRIDELIKESKRRTKEAHRESEELARKTKKSTRDLLREVEKRLREIKEEIKR

SEQ ID NO: 15841 - protein, 59 aa, Artificial Sequence
  Synthetic
SDVEKVVDEVREKVKRDKEDNRRVAKEARELVKESSEKLERLVTEVKKLIKTIEKLVRD

SEQ ID NO: 15842 - protein, 56 aa, Artificial Sequence
  Synthetic
DELLKEIDKLIKESKKETDDLLKEIKDLIDENKRRIDKLLREIEKLARKVKRDIEK

SEQ ID NO: 15843 - protein, 59 aa, Artificial Sequence
  Synthetic
SDVEKVVEELRRLVRKDEEDNRRAVEETRRLVEDSSRKLEEMVRRVRDLIRKVEELVKS

SEQ ID NO: 15844 - protein, 56 aa, Artificial Sequence
  Synthetic
ERLLREIEKLIRESKKKTDDLHRESKKLIEDNKKRIDDLLKEIKDRVERVKEEIRR

SEQ ID NO: 15845 - protein, 59 aa, Artificial Sequence
  Synthetic
DEVKKVVDEVRKKVEEDKDDNRRAVKETRELVEESSRDLKRLVETSRRLIEEVERLVEK

SEQ ID NO: 15846 - protein, 56 aa, Artificial Sequence
  Synthetic
ERLLREIRKLITESKKTTRDLHRDSKRLIDENRKRIRDLHEETRKLVKEVLDKIRK

SEQ ID NO: 15847 - protein, 59 aa, Artificial Sequence
  Synthetic
SDVEKAVDEVRKLVKDSNEKVERVLREVRKLIEEDERKNREVFERVRKLIEDILRLVKG

SEQ ID NO: 15848 - protein, 56 aa, Artificial Sequence
  Synthetic
EKLLRDIREEIERNRRELEKALREIKKEIEKTKRKTDRLLETIKELIDRVVEEIKR

SEQ ID NO: 15849 - protein, 59 aa, Artificial Sequence
  Synthetic
DEVETVKRRVEELVKRSNEELKRIVEETRRRVEDDERDNERIIREIKKKLKDIEELVKS

SEQ ID NO: 15850 - protein, 56 aa, Artificial Sequence
  Synthetic
EEILKTIRRLIEKNREDIDRLHEESKREIDRTKERTDRLLDDVRRIAERIKEEIDK

SEQ ID NO: 15851 - protein, 59 aa, Artificial Sequence
  Synthetic
REVEEVLKEVDELVRKSNEDLKDIVRRTRDLLRKDKERNDEVVRRSEELIRRVEELVRR

SEQ ID NO: 15852 - protein, 56 aa, Artificial Sequence
  Synthetic
EEALERIKRKIDENEKEIRELHKESEKRIRDTLRATDKLHKDTRRRVEEVKEEIKK

SEQ ID NO: 15853 - protein, 59 aa, Artificial Sequence
  Synthetic
SDVERVVERARDLVRKSDDDLRKMVAETKRLVEESSKKLDKIVRESRELIRDVKRLVEE

SEQ ID NO: 15854 - protein, 56 aa, Artificial Sequence
  Synthetic
EELLKEIKKRIDESREKTKRLHEESRKLIEDNKRRIDELHKETKEEVERAKKEIED

SEQ ID NO: 15855 - protein, 60 aa, Artificial Sequence
  Synthetic
EEVKRALEELDELVKRIEEDSRRMVKEAEDLVEKIRKEIEDLLRRSRKLNEDIRRLIDRD

SEQ ID NO: 15856 - protein, 56 aa, Artificial Sequence
  Synthetic
EDILRRADELLKRLRRKDEELTKKIERLLEKVAKEVEDINRESKRSADEVRKRVRK

SEQ ID NO: 15857 - protein, 60 aa, Artificial Sequence
  Synthetic
SSVKEVRDELKRLVDEIRKESEDMVERLRRLVEEIRKRNEELVRRSEELNERARRLIERD

SEQ ID NO: 15858 - protein, 56 aa, Artificial Sequence
  Synthetic
DKILKEAEDLLRDLERRDRELTREVEKLLEELRRTSEETNKRSKESADRVEDEVRR

SEQ ID NO: 15859 - protein, 60 aa, Artificial Sequence
  Synthetic
KEVEEALKRVRELVKRAEDMNEELLRRSRKLNDEIRRRIEEMLRRLEEVVRRIKELVDRD

SEQ ID NO: 15860 - protein, 56 aa, Artificial Sequence
  Synthetic
EKILTEIEKRLKDLEKKSRDSNRESEESLERIRRKVEEIARRVRELLDRLRREVER

SEQ ID NO: 15861 - protein, 57 aa, Artificial Sequence
  Synthetic
SRLEEVTRRARKLVEDITRELRKAVEDSRRVVDKIRRLNEELTRRSRELVKEVKDKV

SEQ ID NO: 15862 - protein, 59 aa, Artificial Sequence
  Synthetic
EKVREILEEIRRLLEELEREVKELNEESKRRLDELEKRSEETNKESEDLLEKVRRDVEK

SEQ ID NO: 15863 - protein, 57 aa, Artificial Sequence
  Synthetic
SELEDVVRRLDELVKRIKEENRETLERSRRLVEEAKRTNEETEDRMRRLVEEIEKKV

SEQ ID NO: 15864 - protein, 59 aa, Artificial Sequence
  Synthetic
EEVRRLLEEIRRKLEDAKRHVEELSEESKKLLKELEEHVREVNKKSEKLLRELKDKVKT

SEQ ID NO: 15865 - protein, 57 aa, Artificial Sequence
  Synthetic
SELEKLVEDVRRLVEKIKRDNRKTLKELEELVREIVERNRDTLRRSRELVDRIKKRV

SEQ ID NO: 15866 - protein, 59 aa, Artificial Sequence
  Synthetic
EDVRRVLKEIKELLERVREHVERLNRDSERLLKDLEEHARRLSKESKELLRELEERVRT

SEQ ID NO: 15867 - protein, 60 aa, Artificial Sequence
  Synthetic
SEVEKIREDVKKLIEESKKLNRDILEEVRKMIERWRDTTRRIRERIRKLIEEAEEEIKRS

SEQ ID NO: 15868 - protein, 56 aa, Artificial Sequence
  Synthetic
SEVLEEVKRLVEESKRESDEILKRVKKLVDDLARTDDKVLEDIKREVDRLKKELED

SEQ ID NO: 15869 - protein, 60 aa, Artificial Sequence
  Synthetic
SEVEKIKKDVDRMITEWEKRSRDIAKTVDELIEDSRRLNETIRRDVDRVARELKERIKRT

SEQ ID NO: 15870 - protein, 56 aa, Artificial Sequence
  Synthetic
DDVLKKIEEALKRLADRDDDILRRIETLVRKTRRESEELLKEVEDKMRKLKEELRR

SEQ ID NO: 15871 - protein, 60 aa, Artificial Sequence
  Synthetic
SEVEKLTEDVKRLIEKSKRNNRDILRKVKEDIDEWRKRTKKIADEVRKTERDLEEKIKRT

SEQ ID NO: 15872 - protein, 56 aa, Artificial Sequence
  Synthetic
DEVLRRIEEDLKRSKKETDDILKEVKDLLTDLLRRDDEVLEEIKRRAERIKEEIDR

SEQ ID NO: 15873 - protein, 60 aa, Artificial Sequence
  Synthetic
REVEKILTDVRRLIEEWRKKTEDIKREVDKLIEEWRKRSDEIADRSRKLAEEIERLLREG

SEQ ID NO: 15874 - protein, 56 aa, Artificial Sequence
  Synthetic
ERVLRKIRRDLERLKKTDDDVLKTIEKKLRELEERDRRLHKESREIAEKLKEDIDR

SEQ ID NO: 15875 - protein, 60 aa, Artificial Sequence
  Synthetic
DEVETIMEKVERDVKRWEELTREIKRRSDKLIEDWKKRSEEVLRESTELIKTIEKLLREG

SEQ ID NO: 15876 - protein, 56 aa, Artificial Sequence
  Synthetic
ESVLRTIDELVRRLEEEDRKVHEESKELARRLEKEDKRLHEESKKLIDELEKKIRD

SEQ ID NO: 15877 - protein, 59 aa, Artificial Sequence
  Synthetic
SEVEKILDEVRKLVKKWDDETRKILEEIDKLIEDSERLLEKIERRSKKLADEIRDLLRK

SEQ ID NO: 15878 - protein, 56 aa, Artificial Sequence
  Synthetic
KSVLDEIRERVTRAKEKDKRVLERVKREVERTKEESKRVHEKSREIIERLKKEIDK

SEQ ID NO: 15879 - protein, 57 aa, Artificial Sequence
  Synthetic
DEVRKVRKELDDAVRKLRRDHERVIRESEKVSKEIEDRARDVERRLDKVVDELRKKD

SEQ ID NO: 15880 - protein, 55 aa, Artificial Sequence
  Synthetic
EEVMKRLRDMIRRLKEDAEKLKRELKRRHERVKELLDKVRRELEKLEKEVDDKVK

SEQ ID NO: 15881 - protein, 57 aa, Artificial Sequence
  Synthetic
DEVREVERESEELSEELRRRHEEVVKESEEVSKEIEERIREVIRDLRRVLRKLEEDG

SEQ ID NO: 15882 - protein, 55 aa, Artificial Sequence
  Synthetic
EEVVKELRELHDRSRKKVEDIAREARDMHRKAADKLRRLMEDLKRVLEEIRKKVE

SEQ ID NO: 15883 - protein, 56 aa, Artificial Sequence
  Synthetic
SRVDKIRRELRELLERDREDLERAMRELRKIDKDIDERLKEVVERLRRIDERIDRE

SEQ ID NO: 15884 - protein, 55 aa, Artificial Sequence
  Synthetic
KEVEKEVEDAIRETEKRAREVEEENRKSVEDVRRKMKKVEEENRKSVEDVRRKAT

SEQ ID NO: 15885 - protein, 56 aa, Artificial Sequence
  Synthetic
SRVDKIRKELEDLLREDEKRIRDMVKRLREIDEKIDRELEKVARELRELLKRVEDS

SEQ ID NO: 15886 - protein, 55 aa, Artificial Sequence
  Synthetic
EEVEKKVRELVERTEETVRDVERENKESVKRVREKAETVKREVEKRAKEVRDKAK

SEQ ID NO: 15887 - protein, 60 aa, Artificial Sequence
  Synthetic
SEMEEVEERLKELDDKDKRDVDEARKRLEKLDRDIDRRIKEVTKRLRDLNRRIEEELRRN

SEQ ID NO: 15888 - protein, 55 aa, Artificial Sequence
  Synthetic
EEVEKKNRKSADDSRETAKRVEEENERTIKRLEEELREVEEEDRKTVEDLRRTLK

SEQ ID NO: 15889 - protein, 60 aa, Artificial Sequence
  Synthetic
DEVREVTKELRDLDREDKKRVEEATKRLRDLNEEDKRLVKKVADDLREDLKRIRERLERN

SEQ ID NO: 15890 - protein, 55 aa, Artificial Sequence
  Synthetic
EEVEKENERSVKKSEEDLKRVKDEDEESVKESRKAVREVEEELRKRLKELREELK

SEQ ID NO: 15891 - protein, 57 aa, Artificial Sequence
  Synthetic
SEDETVRREVRELIRRLRKHSEDVKRESDKLLDEIRRRVKEVEDRVKEAVERLDRKK

SEQ ID NO: 15892 - protein, 55 aa, Artificial Sequence
  Synthetic
EDVVRKIRTVVKKIEEDNKKTADELRKLHKDIKKEVDDMEKRIRKVLDEIDKEIK

SEQ ID NO: 15893 - protein, 57 aa, Artificial Sequence
  Synthetic
DEEERARRELEDLLRRLREHSERVAKEVEEVVERNRRKSEEVEKRVREMLKRLDEKK

SEQ ID NO: 15894 - protein, 55 aa, Artificial Sequence
  Synthetic
KDVVKEIRDRVREAERRNREVVEEIRKLLKEIDKTTRDVEEEIRKLLKRIDEEIN

SEQ ID NO: 15895 - protein, 57 aa, Artificial Sequence
  Synthetic
DEERKARTEVKKEVDDLKKHVKDVADEVREAVKKNRRKSEEVSREVRDLIRRLKETK

SEQ ID NO: 15896 - protein, 55 aa, Artificial Sequence
  Synthetic
EDVVREIRELLKRIREENRRTVEEIRKLLKRIDEATEELVREIRRVVKEIEDKIR

SEQ ID NO: 15897 - protein, 57 aa, Artificial Sequence
  Synthetic
DREEKLRKELKKLIDDDRKKSEDVEREVRKLIKENEDKSRKVEEEVRKLAEELDTKK

SEQ ID NO: 15898 - protein, 55 aa, Artificial Sequence
  Synthetic
EEVIKEIRTVVKRVNEESEEMTKRIRDVVREADKTTEDVRRKIEDMVRRIDERTN

SEQ ID NO: 15899 - protein, 60 aa, Artificial Sequence
  Synthetic
DELRRIEEEVRRRFEEMARRHRKVKRDIEELVKEVTKRNKDTEREIEELVKRMKDEIDRI

SEQ ID NO: 15900 - protein, 59 aa, Artificial Sequence
  Synthetic
EEKVRRVVKKAREAVERSSREVEKVEREVKKLLDDLKKHSEEVEKKVRELLKRLEDRAR

SEQ ID NO: 15901 - protein, 60 aa, Artificial Sequence
  Synthetic
SELEEIVKTAREIMDRVRREHDRVATEIRELVKRLEEANRRVREEIKRLVKEVEERIRKI

SEQ ID NO: 15902 - protein, 59 aa, Artificial Sequence
  Synthetic
REEVEKVVKEIEDVVRESSERVRRVVEEVKKLLRELAKHSEDVEREVRELLKKLAREVD

SEQ ID NO: 15903 - protein, 58 aa, Artificial Sequence
  Synthetic
DELKEIRDRIKKRVEELRRENEEVREEIERIVRKAREDHRRVERELEDLVRRARDKVE

SEQ ID NO: 15904 - protein, 59 aa, Artificial Sequence
  Synthetic
EEEVRRVVKEVEELLEDLKRHSEKVKEEVKRLLEESSREVERVEEKAREMLERLRERAR

SEQ ID NO: 15905 - protein, 60 aa, Artificial Sequence
  Synthetic
SEAEKLRDEIRRIVEKAERDHEDVKKKIEDLVKRVEERNREVTKRIRDLVRDARRRLDEI

SEQ ID NO: 15906 - protein, 59 aa, Artificial Sequence
  Synthetic
KDKLKKVEEEVEELLKKSNRKVREVKRELKELLDRLAKHSDEVRREVEELLRDLARRAT

SEQ ID NO: 15907 - protein, 60 aa, Artificial Sequence
  Synthetic
SELEKIREDMRELVERLKEANDRMREKIRKILEDVDREHEEVRKRIEELVKRARETIERI

SEQ ID NO: 15908 - protein, 59 aa, Artificial Sequence
  Synthetic
KDKVKKVKEDVKRLLDELRKHSEKVIREVEKLLRESNEKVKRVKEKLEELLRRLRERSR

SEQ ID NO: 15909 - protein, 56 aa, Artificial Sequence
  Synthetic
DEIETIKKEIDDMLREIKREVERSKEEIDRALKRIREEVKKSEEEIDKALEELRRN

SEQ ID NO: 15910 - protein, 59 aa, Artificial Sequence
  Synthetic
EEIIKRLLEKIRREARKVKELIRTSNEEVRKRLKDLEELIRKSHEDVRRTLETLERETR

SEQ ID NO: 15911 - protein, 60 aa, Artificial Sequence
  Synthetic
DKERELDKEVRDMIDTLRDSNRRINERSERVLRELDESVKKNEEDIRRAIEELKAEVRRD

SEQ ID NO: 15912 - protein, 55 aa, Artificial Sequence
  Synthetic
EKVLKEIRDLARKIKEDNDRSLEDNDRLAKEIKERNKRVHDETRKMLEDIKRELT

SEQ ID NO: 15913 - protein, 57 aa, Artificial Sequence
  Synthetic
DEDKEIDERVKTVKEEIRRRSKKDKEEVDRVLKESDETLKRILEEVKKVLKEIEERV

SEQ ID NO: 15914 - protein, 59 aa, Artificial Sequence
  Synthetic
EEELRRIVERVRERVTELREKLKEIHKRTREVADELRKNNRRWEEDVRRLVKELREREE

SEQ ID NO: 15915 - protein, 57 aa, Artificial Sequence
  Synthetic
DEEERIRTKVEKVKRELEEKSERDKRALEKVEDESRRTSEEDERELERVIEEIIREV

SEQ ID NO: 15916 - protein, 59 aa, Artificial Sequence
  Synthetic
EEELRRIEREVDRAVKELDRLLRELHRRTREVVKELRDLDRRIHEDTRRVVREAREEVR

SEQ ID NO: 15917 - protein, 57 aa, Artificial Sequence
  Synthetic
SEREEIEERVERVERESEDTSRRDEEALERVLRESEDTSRKDREALRKALEDIEREL

SEQ ID NO: 15918 - protein, 59 aa, Artificial Sequence
  Synthetic
EDVLRRIMEDVKRVADKLRELDKKIHEETRRAVDDLRRLDKEIHDRTRKLVKELREEAK

SEQ ID NO: 15919 - protein, 59 aa, Artificial Sequence
  Synthetic
SEIEEITKDLRRLVEEIERLNKRVEDENERTAKELRDRVREAEKKNRKTVDDIRKLIED

SEQ ID NO: 15920 - protein, 55 aa, Artificial Sequence
  Synthetic
DEVRREVDELIKKSRETLKRIERRSEEVAEELERRLRDIKRRSEDMVRELEERAK

SEQ ID NO: 15921 - protein, 59 aa, Artificial Sequence
  Synthetic
DEKEKVTKKIEELLKAIEDKIREVEKRSRDSAKEIEDRNREVEKRNKDTVRRIRELIER

SEQ ID NO: 15922 - protein, 55 aa, Artificial Sequence
  Synthetic
EEVRKRLEDAVERIKKELKRIKDENDEVVKKSRDSLRRIKEDSERVVRELEERAK

SEQ ID NO: 15923 - protein, 59 aa, Artificial Sequence
  Synthetic
KRKEDIERRIEKLVRDDRRLVREAEKRSKESVDRLRDLVDKARKESDESARTIDKLIKD

SEQ ID NO: 15924 - protein, 55 aa, Artificial Sequence
  Synthetic
ERVRKRLEDVVRESKKRLDEIKKRNEDVVRELEERLRRIEERNRRVAEELKRKAK

SEQ ID NO: 15925 - protein, 56 aa, Artificial Sequence
  Synthetic
SEIEDIERELRESNKRHEDTLRKIKRDLEDSNRRHRETIRDIEARLEEVIKKLRED

SEQ ID NO: 15926 - protein, 56 aa, Artificial Sequence
  Synthetic
EEELRELVKRVHERAERVNRDLKRKVKEVHDRVREVNKELRRKVEELKRRAEERRR

SEQ ID NO: 15927 - protein, 56 aa, Artificial Sequence
  Synthetic
SEIEDIKRKLDDVIREHARTLKEIKDELKKSNERARERIEDIDRKLRDVERRLRES

SEQ ID NO: 15928 - protein, 56 aa, Artificial Sequence
  Synthetic
VEELEDLVRRLKKRVEEVNKRLREKVKRLHDEVDRVLRELEEEVKKLKEDVERAAK

SEQ ID NO: 15929 - protein, 56 aa, Artificial Sequence
  Synthetic
SEREKIEEDIKKALKEAREVVERIKKKLDDSNREHKRTLDEIKKKLDEVIDEVRKS

SEQ ID NO: 15930 - protein, 56 aa, Artificial Sequence
  Synthetic
EEEIREDLERIVTEVKKVLDELDKLVKDLHDEVRKVNEELDRKVKKLRKEAEEKTR

SEQ ID NO: 15931 - protein, 56 aa, Artificial Sequence
  Synthetic
SEIEEIKRRLEDSNRRAREVIKRIEDELRRSNEEHRRTLKEIKEELDRVLEELKRK

SEQ ID NO: 15932 - protein, 56 aa, Artificial Sequence
  Synthetic
EDELREVVKRVHDEVRRELKKLEELVKKVHEDAKRVNEELRRKVKEVKERAERDVR

SEQ ID NO: 15933 - protein, 59 aa, Artificial Sequence
  Synthetic
RREEEVEKRLDDARRRLEKSNRDDERLTRTVEEELKRSNDEIRKRLETAMRELKKLVKD

SEQ ID NO: 15934 - protein, 55 aa, Artificial Sequence
  Synthetic
EEVERRLEKVEEDSRRELKRSEKRSDEVARDSERLLDEWRRRLEEVIRRVKEETR

SEQ ID NO: 15935 - protein, 59 aa, Artificial Sequence
  Synthetic
SREETVRERLREVAERLKKSNREIEELLKKAAEELKESNTRDKKLSEDVSRRLEKLSRD

SEQ ID NO: 15936 - protein, 55 aa, Artificial Sequence
  Synthetic
EEVEERLKRVIEESERRLDKWRRDLDRVIKESEDLLKKSREDSERVVREVEKKEK

SEQ ID NO: 15937 - protein, 60 aa, Artificial Sequence
  Synthetic
SEIEEVERMLEDLERRVREADKRVREESKKLEDEIRREDKRVEEMIDEVRKKVDELDRDV

SEQ ID NO: 15938 - protein, 59 aa, Artificial Sequence
  Synthetic
KDEVRRIEEEVDRVIEENRETVKEIEERNRRVLEANRESLRELEERLKRILEEVRRRSK

SEQ ID NO: 15939 - protein, 60 aa, Artificial Sequence
  Synthetic
SEIDEVRREVEELERRAEEVDREVERRSKELKERVDDVDRRSRELSKRLKDTADEVRKRV

SEQ ID NO: 15940 - protein, 59 aa, Artificial Sequence
  Synthetic
KDKLETIRRRLEEVLKRNKETVDEIRRRNEDVIRRNEESLEKNERDLRRVLDEVRRSAT

SEQ ID NO: 15941 - protein, 60 aa, Artificial Sequence
  Synthetic
SELEKVDELVKRLMKEVRDVDRRSEKLTEELERKVREMDRKSKKLSEDLERDARRVEKEV

SEQ ID NO: 15942 - protein, 59 aa, Artificial Sequence
  Synthetic
KDALRAIEKKLEDILRRNEETLRRNEDKIRRIIETNKRSLEENRRRLEEVLRRVKESAR

SEQ ID NO: 15943 - protein, 60 aa, Artificial Sequence
  Synthetic
SITEKVERLIRELERKVKEIDDDLRRTSEEIMKRARKADEDSERLSERLRELVDRLDREV

SEQ ID NO: 15944 - protein, 59 aa, Artificial Sequence
  Synthetic
RESAERLKEELRRVLEENRETLERLREENERVLEENKRRVDENREKIKEVLRRVEERTR

SEQ ID NO: 15945 - protein, 60 aa, Artificial Sequence
  Synthetic
SITERVEEDIKRLMEEAKRVDDKVRKLVEELMRDVKRVDKELAELVEELERRVKDLTRRV

SEQ ID NO: 15946 - protein, 59 aa, Artificial Sequence
  Synthetic
REEAERLKEELRRVLEENRRTVEEIERRIKRVLEENEETVRRLEKRIEEVLRDVREKTK

SEQ ID NO: 15947 - protein, 57 aa, Artificial Sequence
  Synthetic
SKVEELKRRLKKVRDDDRRSVEKLRETLRRVLARDRDEIREAERELREALKRLEDAG

SEQ ID NO: 15948 - protein, 55 aa, Artificial Sequence
  Synthetic
EDVLRDVERVVREVLEKNKKILKEVKEVVEESLRNVRDLIRRAREIVKEIVDRVK

SEQ ID NO: 15949 - protein, 57 aa, Artificial Sequence
  Synthetic
KEVEDLRRELEEAKKRDKDLIDKLKRRAEEVKEEDERSIRENKKALRKAEEDLRRKG

SEQ ID NO: 15950 - protein, 55 aa, Artificial Sequence
  Synthetic
ERVLEEVRKTLKRSMENVEELEKELEELVTRVRDHNRRDHEETRRLLEEIKRRVD

SEQ ID NO: 15951 - protein, 57 aa, Artificial Sequence
  Synthetic
DEVERLKEKLEEVRRRDEEIIRKLEEDLERVKRDDDRLVRENEEELKRVEEKLERDG

SEQ ID NO: 15952 - protein, 55 aa, Artificial Sequence
  Synthetic
EEVLRRVEEAAKRSLDNVDKLEKDVADLVRRSMENVRDLHRRTRRLLEELKEKVK

SEQ ID NO: 15953 - protein, 60 aa, Artificial Sequence
  Synthetic
SEKEKVLEDAERVLREIKKKNEKALREAEEVARRIAEEVKRIHDRSKEVVDDIKRLADAG

SEQ ID NO: 15954 - protein, 55 aa, Artificial Sequence
  Synthetic
KDVERRVREAKKENDKSVDEIREEVKRVKDELDRLSERNEEELEKVERDLRRRAK

SEQ ID NO: 15955 - protein, 56 aa, Artificial Sequence
  Synthetic
DEEKKVLDKLRELATRLSRRVEEAHRESEKIAEEIRRRAEKVLRESRKTVEEIKRS

SEQ ID NO: 15956 - protein, 55 aa, Artificial Sequence
  Synthetic
ERIKDDVRRMKKELEDLIEENRRRVEKVKEDIRRLIRELEARNEDVDRELRRKED

SEQ ID NO: 15957 - protein, 56 aa, Artificial Sequence
  Synthetic
SRLEKVEKELEELAREDKERIKRVIDDIRRLVREDEERIKEMHKKTEDIVRAIEEE

SEQ ID NO: 15958 - protein, 55 aa, Artificial Sequence
  Synthetic
ERIKKRVEKLKRDSKRLIDELRKELEEVVKRSEDLIKENRDTVKEVSDRIREKAR

SEQ ID NO: 15959 - protein, 56 aa, Artificial Sequence
  Synthetic
DDEERVLKELKKLVEDDRKKIEDVIETIERLAREDVERIKRVIEELRRLVKELEDG

SEQ ID NO: 15960 - protein, 55 aa, Artificial Sequence
  Synthetic
EEIKEDVKRAADESEKLIRELRKAVKRVEEESRRLIEELEREVKEAEERLKRRTK

SEQ ID NO: 15961 - protein, 60 aa, Artificial Sequence
  Synthetic
EEVERLLEELKELVRRIEERLKRAHDEMEDLVRRIKEEIKKLHEDTKRVVEEIRKLIERD

SEQ ID NO: 15962 - protein, 58 aa, Artificial Sequence
  Synthetic
ERVKEAEDRVRDAVRRLKRLLEEHKKASEKVVRELERLLEENRKTVKEVVDRLREESR

SEQ ID NO: 15963 - protein, 60 aa, Artificial Sequence
  Synthetic
REVEELIKELRRLAEEIRDRIRKLHKEMEDLARDIERRIEELDRELERVATEIAKLIERD

SEQ ID NO: 15964 - protein, 58 aa, Artificial Sequence
  Synthetic
EDIKRLEEEVRKVEEELKKLLKEHRDANKEVVDRLKRRIEEHKRKTKDLKEELERRMR

SEQ ID NO: 15965 - protein, 60 aa, Artificial Sequence
  Synthetic
DEVEEVIERLRRLAERIEERLREMDRRLEELVERAKRTIERLHEELEKLVREAEELIRRD

SEQ ID NO: 15966 - protein, 58 aa, Artificial Sequence
  Synthetic
KDVTRLEEELRRVVKKLEDLLREHKEKSDRAVEDLERLLTEHKKRNEDVIRRLKEASD

SEQ ID NO: 15967 - protein, 57 aa, Artificial Sequence
  Synthetic
SEVEEIRKKAEDVMRRLEELDKRLDEVLKKVSRELEKSDKDLEDRIREVIRELEERG

SEQ ID NO: 15968 - protein, 55 aa, Artificial Sequence
  Synthetic
DEMERRLEEVVKEAERRSEEVLRRLEKVVKDIKKKSKEILDRLEELVREIRERVR

SEQ ID NO: 15969 - protein, 56 aa, Artificial Sequence
  Synthetic
SESEEIDREAKKVEREVREMSRRNDEELRRVAKESEDSVRRVEDRVREVSEEVEAR

SEQ ID NO: 15970 - protein, 59 aa, Artificial Sequence
  Synthetic
EKELTEILKRLKDLADELRKLLEDVHRRSKKAADEDRKLNEDILKELEDLARELRKKTK

SEQ ID NO: 15971 - protein, 56 aa, Artificial Sequence
  Synthetic
DEEKKVRDEIRRAEEESRRSSKRNEDELRKVKEEIERRLEEVRRKAKEVEEKVRRE

SEQ ID NO: 15972 - protein, 59 aa, Artificial Sequence
  Synthetic
EEELRRILERLKEMVERDKETNEEIHRRSKDVVDKLRRRIEDIKRRLDELAEKLKEDTR

SEQ ID NO: 15973 - protein, 56 aa, Artificial Sequence
  Synthetic
DDERRIRETLKRADEEVEKALREVREHTKDVERENEKLSKENKERLEEVKKRVDDS

SEQ ID NO: 15974 - protein, 59 aa, Artificial Sequence
  Synthetic
KDVLRKIEKEIEEMVKDLRRLLKEVEDKDRTLAEELRRINEDIHRRSEEMKKELDDRTR

SEQ ID NO: 15975 - protein, 60 aa, Artificial Sequence
  Synthetic
KEVEDVEEKIREIVERIRDEARKAEERNRDTVRRIEDVARKLHKRTKEIVDEIRDVLTKR

SEQ ID NO: 15976 - protein, 59 aa, Artificial Sequence
  Synthetic
KEMLETIKRKVEKVKEDLRKKIEDIEKHTRDVEDKVRKELERNEKKSRDVKEEVERRLT

SEQ ID NO: 15977 - protein, 60 aa, Artificial Sequence
  Synthetic
SELEKAEKENKDSADEIREVLKRLEEENRETAKRIEKHTRDAHRKTEDIVRRIEEVLRRR

SEQ ID NO: 15978 - protein, 59 aa, Artificial Sequence
  Synthetic
KEALKRIRDHVEEVRREVEELLRKIREHTKEVAEKVRRENEKNKKRSEDVRKKVEDDER

SEQ ID NO: 15979 - protein, 60 aa, Artificial Sequence
  Synthetic
SEVERVLEENRKSAKEIEDELRKVLRENEKSAEDIEREIDKAEKENRETVKDLRRVLTER

SEQ ID NO: 15980 - protein, 59 aa, Artificial Sequence
  Synthetic
KEKLETIERHVRKVEEDVERMLKEIERRTRDVMRKVDKLIKEIEKHTREVAKEVKEAED

SEQ ID NO: 15981 - protein, 56 aa, Artificial Sequence
  Synthetic
SLVEDLERKLEESTRRDEESMKRVREILKELEDRDRKSVKEIEDELRKARKEVKDS

SEQ ID NO: 15982 - protein, 59 aa, Artificial Sequence
  Synthetic
EEMAREVIKTLEKVSRELEETNRRVIDRIRKLAEEILRKNKEVLERLRKIVKEIKEKAK

SEQ ID NO: 15983 - protein, 56 aa, Artificial Sequence
  Synthetic
SLVETLKKILDDSTRRNEELIRRLEEELKRIKETNERTVRELERELKRAEEEIERQ

SEQ ID NO: 15984 - protein, 59 aa, Artificial Sequence
  Synthetic
EEAAKRVIERLRRLSERNVRTLEEIIKTLRDLARRSKERDDEVLEELKEMIRRIEEKSK

SEQ ID NO: 15985 - protein, 57 aa, Artificial Sequence
  Synthetic
DELEKVVRELEELAKEILKKLDEIIRDTERLVREAVKRLRELIERTRRLMDEVRKKV

SEQ ID NO: 15986 - protein, 59 aa, Artificial Sequence
  Synthetic
EKVMRELEDTVRRVREELRKLLEEHNRRVKKVLEDLDRLLDEHRKIVEDIKRDLDRREK

SEQ ID NO: 15987 - protein, 57 aa, Artificial Sequence
  Synthetic
SEIEKVLEELRELVKKAVTDLRRIIEESKRLADEAAKALKDIIRRSEELADRLRKEI

SEQ ID NO: 15988 - protein, 59 aa, Artificial Sequence
  Synthetic
EKLARELEDVVRKVKETLDRLLEEHKEIIERIKRTLDKLLKEHNEIVERIKRDLDRRRK

SEQ ID NO: 15989 - protein, 57 aa, Artificial Sequence
  Synthetic
DEMEKVIRDDEKLLEDVLRRLAEIIRRTEKRAEEMVRELEKLIEDSKRKADDVRKRV

SEQ ID NO: 15990 - protein, 59 aa, Artificial Sequence
  Synthetic
EEVVKRLDDIARDVNRTLDKLLKDHNEIVERIERTLDELLKEHNEIVKRIKEDLDRKRK

SEQ ID NO: 15991 - protein, 57 aa, Artificial Sequence
  Synthetic
DDAETVIERDRKLADEVAKELKRLIEETRDLARRIREELRRLIEELKTLAKRAKDEV

SEQ ID NO: 15992 - protein, 59 aa, Artificial Sequence
  Synthetic
RDVVRELREIARKINEDLDDLLRKHNEIVEKIKRDLDRLLEEARKILEEIKRELDETKK

SEQ ID NO: 15993 - protein, 60 aa, Artificial Sequence
  Synthetic
DEEERLRDSVRRSRELIKEIRKRLEESIRRSERINERVREELRRSVRESERSAEEARRRG

SEQ ID NO: 15994 - protein, 56 aa, Artificial Sequence
  Synthetic
TETVLEEHKERVKRILDRARDLLRKHRELVEDSRRHLEKLLRDHRKVVKEIEDKIR

SEQ ID NO: 15995 - protein, 59 aa, Artificial Sequence
  Synthetic
SEEERLRESLERSRKRLEEVKRELERKLEEWEEIVEESRRRAEKSLRESKERIDDLKRR

SEQ ID NO: 15996 - protein, 56 aa, Artificial Sequence
  Synthetic
TEEVLRRHEKVVRRIDEELEELLEELERVIREDTERNKKLLDEHREVVKEIEERVR

SEQ ID NO: 15997 - protein, 60 aa, Artificial Sequence
  Synthetic
SSEKRLRDSVRESRDRARKIEEDHRRLVEEWERLVKRSEEEVRKSVEESREEVEKAKKEG

SEQ ID NO: 15998 - protein, 56 aa, Artificial Sequence
  Synthetic
TDKVLEDHKRLVEKILKEAEDNLRRSRKMIREDEERNRDLLRRHREVVKEVKRKVD

SEQ ID NO: 15999 - protein, 59 aa, Artificial Sequence
  Synthetic
DKEERLRESLEKSDRDIRRIKEELERLLREWEKRVRDSEKELRDVLRKVTEEAKELKKQ

SEQ ID NO: 16000 - protein, 56 aa, Artificial Sequence
  Synthetic
TDDLLRRHKEVVEKILREIEELLRELREAIRRDKKRNDELLKRLAEVAEKIREDVR

SEQ ID NO: 16001 - protein, 60 aa, Artificial Sequence
  Synthetic
SEKETLERSIRESERILEEVLRELKKVLDEWRRRVEESEKRHRDLIEEVRRRAKKLREDG

SEQ ID NO: 16002 - protein, 56 aa, Artificial Sequence
  Synthetic
TDDLLRRHKELVEEIKELLERLLRELEEVIKRDKDKNDENLTRSKRLIEEIEERVR

SEQ ID NO: 16003 - protein, 60 aa, Artificial Sequence
  Synthetic
DSEERLKESVKRSEDDLKRLRDEHRKLVEEWRRRIDESERRHRKLIEDVRRRLTEFRKRG

SEQ ID NO: 16004 - protein, 56 aa, Artificial Sequence
  Synthetic
TDRLVEEHKKMVKEIRDRVKANLERSRRMIKRDKEKNDDNLRRSKELIDKLEEDVR

SEQ ID NO: 16005 - protein, 59 aa, Artificial Sequence
  Synthetic
SKEERLRESSRRSEKAVREVEKRHKESVERSKEEIRRLAEELRKSIEDSERRIKEIRER

SEQ ID NO: 16006 - protein, 56 aa, Artificial Sequence
  Synthetic
TDRLLEEHRKLVERILEELEKNLERHRRVVKEILDRVKELLDEHRRRVEEIERKIE

SEQ ID NO: 16007 - protein, 59 aa, Artificial Sequence
  Synthetic
SKEETLKRSSEESKKELKRVDEELEKIIREWEEDVKRSEKELEEVIERAKREAEKLRTR

SEQ ID NO: 16008 - protein, 56 aa, Artificial Sequence
  Synthetic
TDTLLERHKRLVEEVREKLERLLRRLRKVIKEDRERNKRLIKRLKEVIDEIRERVR

SEQ ID NO: 16009 - protein, 59 aa, Artificial Sequence
  Synthetic
SERERLEDSSRKSKERLERIARTLEKLLRDWRREVEKSEKRHRELVEKVRRDLDDLRRR

SEQ ID NO: 16010 - protein, 56 aa, Artificial Sequence
  Synthetic
TEKLLRDHKRLVDDLDRRAKELLEELKRVIDEDKKRNEKNLTDSRRLVEELKEEVR

SEQ ID NO: 16011 - protein, 59 aa, Artificial Sequence
  Synthetic
SSKERLEESSERSERSIERIDREHERSSEESERRLKKMVDDLRRSSEKSKDDLEKLKRE

SEQ ID NO: 16012 - protein, 56 aa, Artificial Sequence
  Synthetic
TDELVERHKRVVEEIEERAERNLRRHKKVVEDILREARKVLEDHKELVERLKERVE

SEQ ID NO: 16013 - protein, 59 aa, Artificial Sequence
  Synthetic
DAERRLKKSSEDSKRAIDELRKEHEDSSRESKERLDKIKRDHEELVRRARERAEELRRR

SEQ ID NO: 16014 - protein, 56 aa, Artificial Sequence
  Synthetic
AEKLVTDHKRVVETILDKARKNLDRHRRAVEDLLRKARENLKKTEELVRKLDEDVR

SEQ ID NO: 16015 - protein, 59 aa, Artificial Sequence
  Synthetic
DAERRLREILRRVTERLKEVKERHKRSSEKSKKSADDVRREHEKLAEELRRKVEELKRR

SEQ ID NO: 16016 - protein, 56 aa, Artificial Sequence
  Synthetic
TDTVIEELKRRIRELEKRLEENLRRHEELVRRIEEELKRNLKRSRDLLKEIEDKVR

SEQ ID NO: 16017 - protein, 59 aa, Artificial Sequence
  Synthetic
SEAEEVLRRLEELAKRDREENKKVLDDLEKLVREDEERNKEVLKDLEKFIDELDKELRS

SEQ ID NO: 16018 - protein, 59 aa, Artificial Sequence
  Synthetic
KDVVRELERLLREWERDNERSREEIDRVIEEARKRNEDSERELDRLIKEVKDRLDEKAR

SEQ ID NO: 16019 - protein, 59 aa, Artificial Sequence
  Synthetic
SDAEDVLRKLKELIDRDTKENDEVLRKHKRLTDEDRRKNEEVVRELRKIITRLDEKLRA

SEQ ID NO: 16020 - protein, 59 aa, Artificial Sequence
  Synthetic
KEVLDRIRDLLRRWRERNEESRRRAEKSIRDSDETNKRSREEIKRIIRKLREILKERKR

SEQ ID NO: 16021 - protein, 59 aa, Artificial Sequence
  Synthetic
SDVEKVLRELEELIDRDRRDVEKVIEELRKLIKEDEEENREVLKRAEKMLREIREKLRN

SEQ ID NO: 16022 - protein, 59 aa, Artificial Sequence
  Synthetic
EKFLRDIRETLKRWKERNEELTRRLREIIREVEERNEESKRRLDELIREAEEDMRRRRT

SEQ ID NO: 16023 - protein, 59 aa, Artificial Sequence
  Synthetic
SEAERVLEDLKRLIDEDRKKLREILEDHKRLTDEDRERNRRVLEELDKIIKELDERLRS

SEQ ID NO: 16024 - protein, 59 aa, Artificial Sequence
  Synthetic
KDVLDKIEKSLRDWERDNERMVKEADRSVKRSDETNEKSREDLERLIEEARRRLKERER

SEQ ID NO: 16025 - protein, 59 aa, Artificial Sequence
  Synthetic
SEVERVLEELEELARRDEEKNKRVEDRLRKLIEDDRRDLRRILERLREIAERLKEEAES

SEQ ID NO: 16026 - protein, 59 aa, Artificial Sequence
  Synthetic
EEFVRRIRDLLRRWKEEVDRSEDRIRRELEKWERENEEAEKRIRKIIEDLRREIKKKAD

SEQ ID NO: 16027 - protein, 59 aa, Artificial Sequence
  Synthetic
SKLERVLEELERLIREDEDENKKILDRLKKLIDEDKKENDEIMETLKEIARKLTEELRS

SEQ ID NO: 16028 - protein, 59 aa, Artificial Sequence
  Synthetic
EEVLRRIRELIKEVRRRNDESRERIERLLKEWRERVDASERTIREIIKEIKERVRRARK

SEQ ID NO: 16029 - protein, 59 aa, Artificial Sequence
  Synthetic
SKAEDVLRKLKELIDRDRDENRKVLDELRRLIERDREKNRRIMEKLKKIVRELEEALKV

SEQ ID NO: 16030 - protein, 59 aa, Artificial Sequence
  Synthetic
EDVLKRIEDELERWKEEVERSKREIEKLIKEARDENDKSRKTIEKIIREAEKILRDRDR

SEQ ID NO: 16031 - protein, 59 aa, Artificial Sequence
  Synthetic
SEAERVLEELKELIERDEEENRRILEEHKRLTEEDLRENREVMKRLEDIIRELEEKLRT

SEQ ID NO: 16032 - protein, 59 aa, Artificial Sequence
  Synthetic
EKVLTDIERLIREAEKRNRDSKREAEKSVKKSDELNERSRRRIEKIIEELRRLVDTRRT

SEQ ID NO: 16033 - protein, 60 aa, Artificial Sequence
  Synthetic
SDVEKFLDELRELIRRSKERVDRMLRKLEELIRRSSEDVERLLKELKELIDDIRRLLDEN

SEQ ID NO: 16034 - protein, 59 aa, Artificial Sequence
  Synthetic
DELRERIKRLLEEHHKRLREAVEELRKLVEDATEEHERLSERAKRLVEEVKKRVDERER

SEQ ID NO: 16035 - protein, 60 aa, Artificial Sequence
  Synthetic
DEVEKVLRDLEELIRRSETDIRRLLEELKKLIDDTRREVKKVLDDLRRRIKEVLDRIRRN

SEQ ID NO: 16036 - protein, 59 aa, Artificial Sequence
  Synthetic
DEARERLKDTVTKASRRHEKVERDLEKLLEEHHRAIEKLRKELRDLVRKAKEDIDRARK

SEQ ID NO: 16037 - protein, 60 aa, Artificial Sequence
  Synthetic
DEAEKVRREHRELVEDSLRKAEEALKRLDELIKRTEKRVKDVEEELKRLIKRVLDEVRKN

SEQ ID NO: 16038 - protein, 59 aa, Artificial Sequence
  Synthetic
DEVKRRLRTSDKKVSEKHKELLDRLRELLRRHHESLKRLEERIRKLVTDATRRIEEEEK

SEQ ID NO: 16039 - protein, 60 aa, Artificial Sequence
  Synthetic
DEVEELLKEHRELVKESKKTVEKMLRELEELIKRTRDEVEKVERTHEELVRRVDEVLKRR

SEQ ID NO: 16040 - protein, 59 aa, Artificial Sequence
  Synthetic
DELKERLKESDKEASDLHEKAREDLERLLKKHHDDLRKIMERLERSDKEAKKRLEEEKT

SEQ ID NO: 16041 - protein, 60 aa, Artificial Sequence
  Synthetic
DEVEKLLKELEDLRRKTREDLERVKKELEELVKRSKDRLREAEDELRRLVEDIERVIRED

SEQ ID NO: 16042 - protein, 59 aa, Artificial Sequence
  Synthetic
DELKKRIRELVKEHTDELRKVKRELEALVEKATEDHERVLRRLEELVERIKREVDKAEK

SEQ ID NO: 16043 - protein, 60 aa, Artificial Sequence
  Synthetic
SDAEDLLREHRELVERSKREVERVLDELRRLIEKSLREVEKVLKELEKLIREILDRVRKN

SEQ ID NO: 16044 - protein, 59 aa, Artificial Sequence
  Synthetic
DRVREELRRSDEKVSRDHEELVKEAERLVDEATKEHRKLKRRIRELVRRAKEEIEKLRK

SEQ ID NO: 16045 - protein, 60 aa, Artificial Sequence
  Synthetic
SKVEDILRRHRELVKKSLDEIRDLLRKLKRLIEESLRRVEEVLRDHERLVREIEDRVRKN

SEQ ID NO: 16046 - protein, 59 aa, Artificial Sequence
  Synthetic
DELKRRLRESDKRVSERHKRATEEIKKLLDRATEEHKKLVKRLRDSDKRVADELDKAEK

SEQ ID NO: 16047 - protein, 60 aa, Artificial Sequence
  Synthetic
DDVDRVRKEHEKLVRDSLDTARKLLEELEDLIRRDKEDVERVLEELKRLIEEIDDRVRRN

SEQ ID NO: 16048 - protein, 59 aa, Artificial Sequence
  Synthetic
DELIERLRRSDKRASEEHKRLMDEAKRLVEKAEKDVTELNKDIKRLVKEVEDRLREAER

SEQ ID NO: 16049 - protein, 60 aa, Artificial Sequence
  Synthetic
DEVKKVLDESRELVDRIRRKAKEVDDRDRKLIRDVLEELKKLLEENRKLVEDIRRLLEAG

SEQ ID NO: 16050 - protein, 56 aa, Artificial Sequence
  Synthetic
KETLRRLHEETERILRDLKRHNDELNDEARKRLKEVKERLDESHDRVRRELEAKER

SEQ ID NO: 16051 - protein, 57 aa, Artificial Sequence
  Synthetic
KDVEEILRKLKELIDEARRRLEKTLRDHEDIVRRAKRRLEELLKRHRDIMDEVRRKV

SEQ ID NO: 16052 - protein, 59 aa, Artificial Sequence
  Synthetic
EEARRRLEEEVRKVRKEIEDVNRRLEKSHKEAEETLRRVEEELKKSHDELERILREIER

SEQ ID NO: 16053 - protein, 57 aa, Artificial Sequence
  Synthetic
DDVEEILRTLRELIKKIKKDLKKVLDDHERIARRAKEELERILRRHREIVERVDRKV

SEQ ID NO: 16054 - protein, 59 aa, Artificial Sequence
  Synthetic
DEARKKIEDIVREVEDDLRRVAKAAEDSNRKLEKDLREVAERLRKSHEEAEKALRDREK

SEQ ID NO: 16055 - protein, 57 aa, Artificial Sequence
  Synthetic
DDVRRLEEELRRLMEEAERRLRKTLEDHKRIVEEAKRRLEEILREHKRILEEIDKRV

SEQ ID NO: 16056 - protein, 59 aa, Artificial Sequence
  Synthetic
EELKKRVEDLVREIRRRLDKVNEDLERSNRELEKVLRDVLRELKKSHDDLERSLRETRR

SEQ ID NO: 16057 - protein, 57 aa, Artificial Sequence
  Synthetic
DEAEKILDELRRLIDEIRRRLRKTLEEHKRILERIRRELEKMLEEHRRIVDEMRRKL

SEQ ID NO: 16058 - protein, 59 aa, Artificial Sequence
  Synthetic
EEVTRRLEKLVRDVDRDIKRVNKELEKSNRELEKDLRAVEKRLEDSNRDARKKLEDTRR

SEQ ID NO: 16059 - protein, 57 aa, Artificial Sequence
  Synthetic
DDAERILEELKRLMEEVEKRLKDTLDTHREIARRILERARESLKRHEDIAREIERDV

SEQ ID NO: 16060 - protein, 59 aa, Artificial Sequence
  Synthetic
EDVKRKIRELVERAKKRLKEINDELKKSDEDLDRKLEDLNRRLEESNEELKRRLDETRR

SEQ ID NO: 16061 - protein, 57 aa, Artificial Sequence
  Synthetic
SDAEKLLEDIRKLTEDVERDLRRSLEELKDLIRRLKKEIEDLLERHKRIVDKVVREV

SEQ ID NO: 16062 - protein, 59 aa, Artificial Sequence
  Synthetic
EEVKERVERLVREVEKRLDEVDKELEEEVDKARKELEKLLEDIDRSDKEARKRLEDKRR

SEQ ID NO: 16063 - protein, 60 aa, Artificial Sequence
  Synthetic
SKEDEIRRLIEDLERRNKEVEETLRELVRETRERIERIKRRLEELIKKSKDEVDDARRKG

SEQ ID NO: 16064 - protein, 55 aa, Artificial Sequence
  Synthetic
EELLERLERLIDKSRKNVEDIVKRHEDLSRELTERAKAILERHKELTDELREDVR

SEQ ID NO: 16065 - protein, 59 aa, Artificial Sequence
  Synthetic
SEEERIERLIDELRRDNDEVRKRLDKLVKDTERENEEAERRLRRLIEESRREVEKLKAE

SEQ ID NO: 16066 - protein, 55 aa, Artificial Sequence
  Synthetic
EELARELEKLIEDSRRNVKRIKEEHEELSRRNRKLLEDILERHRRLTEELRKKVK

SEQ ID NO: 16067 - protein, 60 aa, Artificial Sequence
  Synthetic
SKEREIEELIKELEEEVERLKEELRRIIKKLRDDNKRAEEELERLIRESKEDLDRARKEG

SEQ ID NO: 16068 - protein, 55 aa, Artificial Sequence
  Synthetic
EELRKELEDVRRKLKEEIDRILEEAKRVVDDSRRNAEEITRRHKEATKRLREEVE

SEQ ID NO: 16069 - protein, 60 aa, Artificial Sequence
  Synthetic
SIAERLKELIDRMREDNERAAKELRELIRKAKEESKEVEERLRRRLKELRDRVEELVRRN

SEQ ID NO: 16070 - protein, 59 aa, Artificial Sequence
  Synthetic
KEMLDRILEELKKLIKESRENLRRILEDLKRLLDESRRHAERITRRLEELIKELKEKAD

SEQ ID NO: 16071 - protein, 60 aa, Artificial Sequence
  Synthetic
KARERLKRLIEEAKRRNEEMEKELDRRLDELRRESKTLEEDLRRSLEELEERIRRLVKRN

SEQ ID NO: 16072 - protein, 59 aa, Artificial Sequence
  Synthetic
REMVEEILRELRKLVEDSLEVLERILDDLRRLIEESRKHLEEVKRRLEELKKRLEDEAR

SEQ ID NO: 16073 - protein, 60 aa, Artificial Sequence
  Synthetic
KEVEKILEEIERLIREIDREVKRVKTENEKTVRDIRKRVEEIKEEHKDLTRKLEKLARDG

SEQ ID NO: 16074 - protein, 59 aa, Artificial Sequence
  Synthetic
DEARKRAEDLLRDAKRRVDEVVEELKKTVEELKEEVRKVEEELKELVKRSEDKVRETER

SEQ ID NO: 16075 - protein, 61 aa, Artificial Sequence
  Synthetic
SEVDKVLKEHEDLVREDKKRLEEILRELKDRLRRDEEELRRIMEELEELLRRLKDVVDKRR

SEQ ID NO: 16076 - protein, 59 aa, Artificial Sequence
  Synthetic
KEMIDRLRRSDEELKKEADRANEEAKRIVEKIRDTLKKANDKLDEIVERIEDELRRAET

SEQ ID NO: 16077 - protein, 60 aa, Artificial Sequence
  Synthetic
KEAEDVEEEHKRLVEDDRRKLEEIKKTLERLVEEDRRRLEEVVRELKRLLDEITDVLTKR

SEQ ID NO: 16078 - protein, 59 aa, Artificial Sequence
  Synthetic
DEVRKRLRKSDKELRDEAREVNKELEAIVKRARDEVKKVNDDLRKIVDEVRETVKEARR

SEQ ID NO: 16079 - protein, 60 aa, Artificial Sequence
  Synthetic
DEVREVKKRLRDLIRDDERELRRVLEELKELVKDDVDKLRRLIEKLRKLLEELRRVATKR

SEQ ID NO: 16080 - protein, 59 aa, Artificial Sequence
  Synthetic
EKAREELKRIVEEVEEKSRRANKKLKDIVDEMRERVKRANEELDDIVKKITEDLERMRK

SEQ ID NO: 16081 - protein, 60 aa, Artificial Sequence
  Synthetic
REVDEVRKEHERLVKEDEDKLRKIIEDLKKLLREDEKRLREALKRHRELVEEARDVVRKR

SEQ ID NO: 16082 - protein, 59 aa, Artificial Sequence
  Synthetic
DKVKKELEESDRRVEEKSRRANETLKRIVEEIRKKAEEINRRLKESDDRAAEDIKRVEK

SEQ ID NO: 16083 - protein, 60 aa, Artificial Sequence
  Synthetic
DEARRVKEELDKLRREDEELLRRLMEKLKDLIRRDTEELKRIIDELRELVERLEDELRRR

SEQ ID NO: 16084 - protein, 59 aa, Artificial Sequence
  Synthetic
EKVREELRRIVDRVKKEVDRANRELEDIRREVEEISKRANEELERIVTEAADRLRKVAE

SEQ ID NO: 16085 - protein, 60 aa, Artificial Sequence
  Synthetic
SEAEKVIREHERLLEEDRRRLEEALRTLERLAERDEERLKEAEERHRDLLRKLEETVKKR

SEQ ID NO: 16086 - protein, 59 aa, Artificial Sequence
  Synthetic
DEVKRRLRKSDEDVKRRAEEINKEAKEIVDDVKKKSDEANKRLKDSDKRVAERLKEAED

SEQ ID NO: 16087 - protein, 61 aa, Artificial Sequence
  Synthetic
SEVEKVIEDHDRLLKRDEELLRKIAEDLKDLVRRDEERLRRATEKLKRLLETLEDVLRKRR

SEQ ID NO: 16088 - protein, 59 aa, Artificial Sequence
  Synthetic
KEVKDKLRRSDERVEKRSRDANRELEEIVRRARKKSEEANRRLEEIVERAEKRLKEAED

SEQ ID NO: 16089 - protein, 59 aa, Artificial Sequence
  Synthetic
SEVDKVVEESKTSMRRLERRHREATKESKKSIEEIEETVERVKRESEKSVKKLDDLVKN

SEQ ID NO: 16090 - protein, 59 aa, Artificial Sequence
  Synthetic
EEVRRRLRKIHKELEERLRRMNKRLRELHRELEEKVKEVKKELEDIHRKARERVEKAKE

SEQ ID NO: 16091 - protein, 59 aa, Artificial Sequence
  Synthetic
EELKEVRERSKESIKRIKEEHERVEEELKDIKRDIDRRHKEVVDESRESVKRVEDLSRA

SEQ ID NO: 16092 - protein, 59 aa, Artificial Sequence
  Synthetic
EEVRRELREIHDELRKRVEEANKRLEDILREIDKRLKELNEELKRIHDRARERLEEERR

SEQ ID NO: 16093 - protein, 59 aa, Artificial Sequence
  Synthetic
DEIREVIKESKKSVEDVKRRHEEAKRESERSLKEIRELAEEVKERLRDLLRRIRKLVKD

SEQ ID NO: 16094 - protein, 59 aa, Artificial Sequence
  Synthetic
EEVRRRLRKIHKEAEERLRRANDELRKLHEEIKKTVEKIKRELDKIVEEIERDVRRDRK

SEQ ID NO: 16095 - protein, 59 aa, Artificial Sequence
  Synthetic
SRVEEILRDSKRSMDEARKEHERVLRELRDRLRRLDERHRRLLEELKRLLREVRELTRA

SEQ ID NO: 16096 - protein, 59 aa, Artificial Sequence
  Synthetic
EEVLRRLDDIHRRIKRELKEVNDRLEEIVREIRKRLKEVNERLKEIVDAVEEVVRRAEK

SEQ ID NO: 16097 - protein, 59 aa, Artificial Sequence
  Synthetic
KRLEDVARESKKSIDEIRKRHKEATDESNKSIEEARRIHEEVLRTLKELLDRVRKLIES

SEQ ID NO: 16098 - protein, 59 aa, Artificial Sequence
  Synthetic
EEVRRDLRRIHERLREEAEEVNERLERNHEELEREARKVNEELRKIVEDARREVERAKD

SEQ ID NO: 16099 - protein, 59 aa, Artificial Sequence
  Synthetic
DDVEEIKRRLEELLERLKEDHKRMLEESRKSVEDAEKIVEEVKKESEDSIREIKKLLKD

SEQ ID NO: 16100 - protein, 59 aa, Artificial Sequence
  Synthetic
EKVKRELDEIVKRIEDEARKVNEELKRIHDDAERKVRKVKEDLERIHRELKKRVEDDRT

SEQ ID NO: 16101 - protein, 59 aa, Artificial Sequence
  Synthetic
KEDERVEEELRKLLKELEDRHKKASEDSRDSIRRIRERARTVLEELKRVLEDIDRLIKA

SEQ ID NO: 16102 - protein, 59 aa, Artificial Sequence
  Synthetic
EEVKRRLDKIVDDVRERLKEMNDRLRRLHEELKRELERIKEELDKILEEVKRRLEEARR

SEQ ID NO: 16103 - protein, 57 aa, Artificial Sequence
  Synthetic
ELEERLTRSNDELRKELKRMNEELRRKLEEIRKELERLNEKLREIIERIKEDLDRRA

SEQ ID NO: 16104 - protein, 59 aa, Artificial Sequence
  Synthetic
RELAEEFLRRHKELVERIREIHERLRERLEELLRRIEELHKRLEDELREVLKRIEDEIR

SEQ ID NO: 16105 - protein, 57 aa, Artificial Sequence
  Synthetic
KKEEDLDESNKRARDELKEMNDRLRKIVKEIEDELRRLNEEARRSNEELRRRVEERL

SEQ ID NO: 16106 - protein, 59 aa, Artificial Sequence
  Synthetic
DELAKKVIKEHEDLVREVLKRHEDLLRRARELLKKIKEIHDRLLDEHRKLVEDIEREAT

SEQ ID NO: 16107 - protein, 57 aa, Artificial Sequence
  Synthetic
DRERELEKSNRELERELREALKRVKEIIDRIRKTLEDMNRRLKRSNEEAERRLREKA

SEQ ID NO: 16108 - protein, 59 aa, Artificial Sequence
  Synthetic
DELAERVIREHRRLAEEIRRLIEKLKREIEELLERARRTHEDLLRKHKELVKKVDEEIR

SEQ ID NO: 16109 - protein, 57 aa, Artificial Sequence
  Synthetic
DDEEEVKRSNDELRKEIKEAEERLEKSNRELEEDLRRMNRELEESNKRLRELLEREA

SEQ ID NO: 16110 - protein, 59 aa, Artificial Sequence
  Synthetic
KELAEDMLRRHRDLVREIRELIDKLTRDHDRLVKEAREIHKRLTERHRKLVEDIKRETD

SEQ ID NO: 16111 - protein, 57 aa, Artificial Sequence
  Synthetic
SKEEELEKSNRKLKEDLERMNEDLKRILREVEDVLRRIEEELEKLVRELEEILKRRV

SEQ ID NO: 16112 - protein, 59 aa, Artificial Sequence
  Synthetic
DELAEEVIDRHRDLVRRIKDEHRKLTDELRKLLEDIERLAEEAKRKLEKLIEDVEREAN

SEQ ID NO: 16113 - protein, 57 aa, Artificial Sequence
  Synthetic
SSEERVKKVVEELEDLIRKIREEHKDSIRENRKVVEDIRERVKELITELKKELEDKL

SEQ ID NO: 16114 - protein, 56 aa, Artificial Sequence
  Synthetic
TEDLLRRLRKLIEDVFREARENLKRHKKMSKEAKEKLEELLKRLRDLIKEAREKIK

SEQ ID NO: 16115 - protein, 59 aa, Artificial Sequence
  Synthetic
SEADEVLRTHEELVRELEERAKEILRRHRKLSEESERKAREVLKTLRDLIRELKKLADE

SEQ ID NO: 16116 - protein, 59 aa, Artificial Sequence
  Synthetic
EEIARRIEESEDKSRRIIDEVRERVRKSIEENKRVVEEVRERVERLIKELDKIVEDIRR

SEQ ID NO: 16117 - protein, 60 aa, Artificial Sequence
  Synthetic
DELEKVIEELKRRIEEVKKELTELNKELKDVSKEIEDVIRDLNRELKKLSDRIKELADRD

SEQ ID NO: 16118 - protein, 59 aa, Artificial Sequence
  Synthetic
EEIRRRLDEVLRKAEEDLRRAEESNDEHLRKSKEDVERARKSNDKHLDDNRKTLEEATR

SEQ ID NO: 16119 - protein, 60 aa, Artificial Sequence
  Synthetic
SDVEDLLRRLRKLTKDIEERVKELNKKLEDVSRDIKRRVEEVLKKLEDVLRKARDEVRKL

SEQ ID NO: 16120 - protein, 59 aa, Artificial Sequence
  Synthetic
DRAEKELRKILEDHKEISDRVRRSNEKLLRDHRRTSETVKRRLEKVLEDIRKELEDAKR

SEQ ID NO: 16121 - protein, 61 aa, Artificial Sequence
  Synthetic
DVEERVKTIVDDIERTLDEVRRRLEESHKRLEDALKEVDDRLKKLLKETEEVLKRIEDERG

SEQ ID NO: 16122 - protein, 59 aa, Artificial Sequence
  Synthetic
KEKVEELLRRLREILERVTRRLEEVLKRHRDLVEEVKKELERVLEDHKRLSEDAERRAR

SEQ ID NO: 16123 - protein, 60 aa, Artificial Sequence
  Synthetic
SVEEALEKSVKESEEVLKKAEKELRESHEDAKRVLKEVRDELERLMEETKKELRDVERKR

SEQ ID NO: 16124 - protein, 59 aa, Artificial Sequence
  Synthetic
KEKVDRILKKDKDLIDRVRRELKKMLDRHRKLVEDVKRELEEALKEHKDDSKRVRDKLK

SEQ ID NO: 16125 - protein, 60 aa, Artificial Sequence
  Synthetic
DIEDRLERVVRDAKRVLADVEDKLRKLLEETERMLRRVKRELERSHEEAEEELRRVEEER

SEQ ID NO: 16126 - protein, 59 aa, Artificial Sequence
  Synthetic
KKLLEDILRKLRKIIEEVKRTLEEALKRHRDLTRKVVEELEDLLRKHRRIVEEVKKRLK

SEQ ID NO: 16127 - protein, 60 aa, Artificial Sequence
  Synthetic
DIEDELRKSVKRSEEVLREVEERLKRLLEETKEVLTRARETNEKSHRELEDKLRKIEEER

SEQ ID NO: 16128 - protein, 59 aa, Artificial Sequence
  Synthetic
ESKLRELLKRDKKEIDDVKRELERLLEDHKRLTEEIRRRLKRLNEKHREIVKRVEKELK

SEQ ID NO: 16129 - protein, 60 aa, Artificial Sequence
  Synthetic
DVEDRLRESEKRSEKTLKDVEERLRRSHEDLEKKLREVEKRLRDSHREAEKTLKRVKEEK

SEQ ID NO: 16130 - protein, 59 aa, Artificial Sequence
  Synthetic
KEVVRKILEDDKRLIEEVKKELERVLEEHRRLVEKVKRELEEVLKRHKEIVDDVRRRLE

SEQ ID NO: 16131 - protein, 60 aa, Artificial Sequence
  Synthetic
SIEDELRKIADEARKVLDKVRKDVERSHREAEKKLREIDKRLKDSARDSKRVLDEVREER

SEQ ID NO: 16132 - protein, 59 aa, Artificial Sequence
  Synthetic
EEKLERILRKLKKIIKDVEDELRKLLEEHRELVKKVEKDLRDLLERDRELIEEVERRLR

SEQ ID NO: 16133 - protein, 60 aa, Artificial Sequence
  Synthetic
DIEDRLRTSVKKSRDVLEEVERKLRDSHRRAKEVLDKAREDLRKSKEDSKRVLDDVRRKR

SEQ ID NO: 16134 - protein, 59 aa, Artificial Sequence
  Synthetic
KEKLEDVLRRDEELIDRVRRRLERILEEHEELVKRVEEELRRVLEEDRKLIKRVKEELE

SEQ ID NO: 16135 - protein, 60 aa, Artificial Sequence
  Synthetic
DIEDALRDSERESEEVLKRAREELEKSHKEVKKRLDEVEKTNKDSVDESKKVLDDVRRKR

SEQ ID NO: 16136 - protein, 59 aa, Artificial Sequence
  Synthetic
KELLKKILKEDKELIKRVEEILRRILEEHRELVRRMKKELDELNKRDKELIDRVREELT

SEQ ID NO: 16137 - protein, 60 aa, Artificial Sequence
  Synthetic
DLEEEAKKSVRESERALDEVRKRLDRVRKEVERELRKVEEDLRRSHRKLEDILRRVAEKR

SEQ ID NO: 16138 - protein, 59 aa, Artificial Sequence
  Synthetic
EEAARRILERDKALIEKAREDLKRILDEAREILKEAAKRLEDILRKHKKIVEDVARELE

SEQ ID NO: 16139 - protein, 60 aa, Artificial Sequence
  Synthetic
KIEEEVEKLIRDARRIIEEMRESTERLIERNEEVLETVRREVEKLLRDLERILEKIKREL

SEQ ID NO: 16140 - protein, 59 aa, Artificial Sequence
  Synthetic
EEVLRRILEEIRKIVEDVRRELDTLNRELEELTKESRRRAEELLRRLKEIVKKVERDAE

SEQ ID NO: 16141 - protein, 59 aa, Artificial Sequence
  Synthetic
REVEEILKEVETLIRENKKKLEEWLRTHEKLNEDLERKAREILTRHRRENEDLKRVADD

SEQ ID NO: 16142 - protein, 59 aa, Artificial Sequence
  Synthetic
DEVKRRIEELIKKSKRVNDEANRRVDKLVKDTRDKIREIEERIRKLIEESKKLLEDKRR

SEQ ID NO: 16143 - protein, 59 aa, Artificial Sequence
  Synthetic
REVEEILRRVRELIERNRKEVEDWMRRHRRVNEELKRKAREILERIKEMLKTLKEVLER

SEQ ID NO: 16144 - protein, 59 aa, Artificial Sequence
  Synthetic
DEAAKRIEKLIKESRERNEEVNRKIKKLIEDTRRVVEDVRRKVEELVKRLRTELDRARK

SEQ ID NO: 16145 - protein, 59 aa, Artificial Sequence
  Synthetic
SEAEEIAKRAKEAIERNRKLAEEWAKRARDAAERLKELYKRIAERHRKANEELRRAAER

SEQ ID NO: 16146 - protein, 59 aa, Artificial Sequence
  Synthetic
DEARKRIRELIERSKKANKEANDRARKLAEDAKRLNEEANERAKRLAEESREAIKEAER

SEQ ID NO: 16147 - protein, 61 aa, Artificial Sequence
  Synthetic
REVEEVAKELRELIKRTEDLIRRALERNRKLVKETRDLIEKVLRDLRDLLRRLEEEARRRG

SEQ ID NO: 16148 - protein, 56 aa, Artificial Sequence
  Synthetic
DKTLRDLLREHKELVEEAKRRLEESNDEHRREVEDAERRIEEIVRDAKRVVDEIER

SEQ ID NO: 16149 - protein, 61 aa, Artificial Sequence
  Synthetic
SEVEKVVTELRRLIERLEEVIRRALDTNRKLLEDTEKEAERMMRKLEELIKDLERDLREKG

SEQ ID NO: 16150 - protein, 56 aa, Artificial Sequence
  Synthetic
KETLRKLLKELREVLDKAREDLERSNRDHRRAVEEIKERLERLLKKLEDVVRKAKE

SEQ ID NO: 16151 - protein, 61 aa, Artificial Sequence
  Synthetic
KEAEEAAKKLKDLIKEDRERARRALEENKRLIDELRKAAKEALDRNRELLERLRDEARKRG

SEQ ID NO: 16152 - protein, 56 aa, Artificial Sequence
  Synthetic
KDTAEDLLRRATRDSEEAKKKLKKSNEEAAKAVEEAKERLKRSVDEATKAVEEAKR

SEQ ID NO: 16153 - protein, 59 aa, Artificial Sequence
  Synthetic
SEVEKALEESKESLKTIKKIAKDVLTESEESLRRTKKLIEEVLEASKRSIEELKRLSEA

SEQ ID NO: 16154 - protein, 56 aa, Artificial Sequence
  Synthetic
EDELRRLHEDVKRLVEEIAKRLDELHDRHRETVKRAKEELDKLHDRARKEVEDDKR

SEQ ID NO: 16155 - protein, 59 aa, Artificial Sequence
  Synthetic
SEVEKVLKDSEKSIEDAERIARDVLRKSEESIDRIRRIAEEVLKESEKSIRDAKKLAED

SEQ ID NO: 16156 - protein, 56 aa, Artificial Sequence
  Synthetic
ERELDRLHEKLRRVVEEIEKELRESNRKLEEVLRDIKRKLDDLHRKAREILERIRK

SEQ ID NO: 16157 - protein, 60 aa, Artificial Sequence
  Synthetic
SEVEEVLKRIRDVIKTMEDRAREVLKESEKSIKEIRDTIREVLKRSEDSIRRIDEELKKG

SEQ ID NO: 16158 - protein, 56 aa, Artificial Sequence
  Synthetic
KDRLDELLKRAEEVLRKIKEDLRRSNEKLREEVKEAKKRLDDLHRELEDVLREAKR

SEQ ID NO: 16159 - protein, 60 aa, Artificial Sequence
  Synthetic
KETEEAEKLAREAARRSEKLAEEAEKRAKEAIDESKELADRARDTARRADEDLERLAREG

SEQ ID NO: 16160 - protein, 56 aa, Artificial Sequence
  Synthetic
REKLDDLLRRHNEKVKRAKERLDRLLEEHEKRIRDAERDLERLERELKKKAEDKRR

SEQ ID NO: 16161 - protein, 60 aa, Artificial Sequence
  Synthetic
SETEEALERLRKMIEDSRRLAKKIREDLREMIERSRRLAEKVRRDDEKSSEDLRRVTEEG

SEQ ID NO: 16162 - protein, 56 aa, Artificial Sequence
  Synthetic
KDRLDRLLEEHNRIVKEIKEDLDRLLREHNEIVKRIKDDLDRLHEENRRLLEESER

SEQ ID NO: 16163 - protein, 59 aa, Artificial Sequence
  Synthetic
SKEDLVRELKKKLEEVVKRSREESERSLRKLEKVIRDFRRESERLKKESRDVVKKARED

SEQ ID NO: 16164 - protein, 55 aa, Artificial Sequence
  Synthetic
EEVLKEIDDLIRRDEERLRRVLRESEELIKEIKKRAEEMLTRSKKLTRDIEEKTR

SEQ ID NO: 16165 - protein, 59 aa, Artificial Sequence
  Synthetic
RDREELRRLEEELRRVFEESRRRSERSKKELDKIVKEAEKASKRSLDKLKRVFDELRRR

SEQ ID NO: 16166 - protein, 55 aa, Artificial Sequence
  Synthetic
EDVLRDARELIERDREELERVLRDSDRLVREIKKRIEEMLKRSEDLIEEIERRAR

SEQ ID NO: 16167 - protein, 61 aa, Artificial Sequence
  Synthetic
SEVERVLKEIEDLIEEIERRAKTVLEEIDKLTKEIEEVVKRMLDRDRELIKTAEDLLRKNK

SEQ ID NO: 16168 - protein, 58 aa, Artificial Sequence
  Synthetic
RVRKALEDLLRKVEEVVRRVREELKKLERKDREVVRKVEEDSERSLRELEKVADEARK

SEQ ID NO: 16169 - protein, 60 aa, Artificial Sequence
  Synthetic
SEVEKVLRELKELTRRIREEAERLLREDERLLREAERIARELLETNKRLIEEIERRLRER

SEQ ID NO: 16170 - protein, 58 aa, Artificial Sequence
  Synthetic
RVKKDLEEVRKRDREVVEEVRRRSEKSKEDVRRLVEKIRKDSEDSLKELKEVVEEARR

SEQ ID NO: 16171 - protein, 60 aa, Artificial Sequence
  Synthetic
DEVEKMLEELKRLTDKIREDAERLLKRSEELTEEIKRLIDELLKEIEELIKEARDIVRRN

SEQ ID NO: 16172 - protein, 59 aa, Artificial Sequence
  Synthetic
ERVRRELEKVEREDRKVVRDAEEELKKSRKKSEDVVKEAKERLEELLRRVKRVVDEVRR

SEQ ID NO: 16173 - protein, 60 aa, Artificial Sequence
  Synthetic
SEVERVLKEIEELTRRLREEAEELLERSERLTEKIRRRAEELLKRNEDLIEKIERDLRRN

SEQ ID NO: 16174 - protein, 59 aa, Artificial Sequence
  Synthetic
DRVKKALDELRRRDREVVKRLEEELEKSKKKSEDVVREVEEKSERSKRKLERVADEARR

SEQ ID NO: 16175 - protein, 57 aa, Artificial Sequence
  Synthetic
SEAEKLLKEDEDLIRKARDEIRKVLEDDERLIEEVERKSREMLKRIKEIIDDMRKRI

SEQ ID NO: 16176 - protein, 59 aa, Artificial Sequence
  Synthetic
KEVVEEVRKSRKKSEDVLREVERELKKSFEKSKRVNDDSKKKLDELKREADEVIKRLKD

SEQ ID NO: 16177 - protein, 57 aa, Artificial Sequence
  Synthetic
SRAEELLKRDEELIDTVRRRIEKMLREIKEIIDRVKRKSEKMLEDDERLIREVEKRV

SEQ ID NO: 16178 - protein, 59 aa, Artificial Sequence
  Synthetic
EEVLRELEKSRKKSEEVLERVKRELEKLERRAEEVNKESEDRLRESEKESKKVIDELRR

SEQ ID NO: 16179 - protein, 57 aa, Artificial Sequence
  Synthetic
RRAEELLRTIKEIIKRIDDELKRVLDDDDRLIDELRKESERLLEEIERIIRRIEREV

SEQ ID NO: 16180 - protein, 59 aa, Artificial Sequence
  Synthetic
EEVLRELRKLEEEAKAVIDKARRELERSERKSEELNRESKRRLEELSRRAKRVIDELRK

SEQ ID NO: 16181 - protein, 57 aa, Artificial Sequence
  Synthetic
DEVRRLLKEIEDIIRRIEEDIRRMLEKDRKLIEEVERKSKEMLDRDKRLIEELEKRL

SEQ ID NO: 16182 - protein, 59 aa, Artificial Sequence
  Synthetic
EEAVRELDRLRREAEEVLDRVRKKLDKSRKDSERVNEESERRLERSAEESKRVLDELRR

SEQ ID NO: 16183 - protein, 60 aa, Artificial Sequence
  Synthetic
DVREELKKVVDKAEKVSRKSRDDLDKVRKRVEEVNRDNERRLREIAKKVKEVLRDIDRKR

SEQ ID NO: 16184 - protein, 59 aa, Artificial Sequence
  Synthetic
KEVVKRLLEDVDRLIREVEKESKRLLDEIEEMIEELKRRAEENLKTIEDIIKDVTEKAT

SEQ ID NO: 16185 - protein, 59 aa, Artificial Sequence
  Synthetic
REVEEVLKTVRKLIEELERSSRKSLKEVKELLEKLEEDARRSLKRVKELLKELEDRSRT

SEQ ID NO: 16186 - protein, 59 aa, Artificial Sequence
  Synthetic
EEAKKRIEDLIRELEELLRESSDRHRKLDEELKKLLKDVTDAHRRLMEELRKLLEDIET

SEQ ID NO: 16187 - protein, 59 aa, Artificial Sequence
  Synthetic
DEVETILRDIKRLLREIEELARKSSKKFKELLERLEETARRSLTRIERLLEEVEDISRT

SEQ ID NO: 16188 - protein, 59 aa, Artificial Sequence
  Synthetic
EDAAREIEKLKRELERLLEEASRTHEELTRRLEKLLEDATREHERLKRELEKLLEDIKK

SEQ ID NO: 16189 - protein, 59 aa, Artificial Sequence
  Synthetic
REVEEILRKIRELLEELRKRVEESRRRIEELLKKLEEEVRESEKDVRRLLRELEEISRT

SEQ ID NO: 16190 - protein, 59 aa, Artificial Sequence
  Synthetic
EEAAKEIEKLVKELEELLKRASDKHRKLSKDLEDLLREVTERHRRLEKELEDLLREIER

SEQ ID NO: 16191 - protein, 59 aa, Artificial Sequence
  Synthetic
SEVEKLLEEARRLLKELEDSSRRSVEEAKRLLEELKRRVEESVRRIRELLKDLERLSSR

SEQ ID NO: 16192 - protein, 59 aa, Artificial Sequence
  Synthetic
ERAKEALRELEKRLRDLLRDSSRLHEDLARDLKRLLDEVTEEHDKLRRELRKLLEDIKT

SEQ ID NO: 16193 - protein, 59 aa, Artificial Sequence
  Synthetic
SEVEKVEEDVKRLLKEIEDSSRRSLEKAKRLLEELRRSSEESLKRIRDLLEELRELSRT

SEQ ID NO: 16194 - protein, 59 aa, Artificial Sequence
  Synthetic
EEAKKRIEELKRELEELLKKSSEEHKKLVKELKELLKKSTEDHEKLKRDLRKLLEEIRT

SEQ ID NO: 16195 - protein, 60 aa, Artificial Sequence
  Synthetic
DSEDLMRRVKEELDKLVKDSRKRSEDLKRENEELLRRSEEALEKSVRDADRLFEEIKRTK

SEQ ID NO: 16196 - protein, 55 aa, Artificial Sequence
  Synthetic
RDVLKTLKDLIRELKRHSEEVEREDKETTDRLRRHSEKALRTNEEIIRRIEERAR

SEQ ID NO: 16197 - protein, 60 aa, Artificial Sequence
  Synthetic
SVDEALRDIERKVEELMRESDERLRRVKKEVEDNVRRSEEELKRIADEMKELLDRARERG

SEQ ID NO: 16198 - protein, 59 aa, Artificial Sequence
  Synthetic
EDLVREVLKKLKELIDRWRDLSRRLKERLDTLIKEHHELSKRLLERLKRLIDEARKKLN

SEQ ID NO: 16199 - protein, 59 aa, Artificial Sequence
  Synthetic
SEVEELKREADDVNRRAEELARETLKKIEKVNREVKRRLEEALREIEELLRRAEEIVRR

SEQ ID NO: 16200 - protein, 59 aa, Artificial Sequence
  Synthetic
EEARKRLEEVVRHNKKLDDEHRKALDELRKHNEDLDRRSKEELDKLRKRLEDLLRKVKE

SEQ ID NO: 16201 - protein, 59 aa, Artificial Sequence
  Synthetic
REVEELLKEIEEVLKKSERLSRESLKKIREVLERIERLARENVKRMKEVIDRVRELAER

SEQ ID NO: 16202 - protein, 59 aa, Artificial Sequence
  Synthetic
EDARRALEELRKRVEEVNKKSRDDLERLTREAEELNRKNEEDLRRLEKEVKDLLDEIRR

SEQ ID NO: 16203 - protein, 60 aa, Artificial Sequence
  Synthetic
SSRETVKRLTEEARKLLEDWKDRNRDVERKVEEIIERIRRTNEKSERDARRKLEEVDKRR

SEQ ID NO: 16204 - protein, 56 aa, Artificial Sequence
  Synthetic
TEELKREIERILEELRRLMKEDKEELERILERLRRLAEEDKKENEEILDRVDKKAK

SEQ ID NO: 16205 - protein, 60 aa, Artificial Sequence
  Synthetic
STEETITDLKREAEEILRRWREENKRVSDEAAESVKESDKTNKKSKDDLKRVLDEVDTKE

SEQ ID NO: 16206 - protein, 56 aa, Artificial Sequence
  Synthetic
AKELEDEVREALKRIRKLIEEDRRKLKRILDEHRRLTEEDRERNERVLRELREDTR

SEQ ID NO: 16207 - protein, 60 aa, Artificial Sequence
  Synthetic
SVDESLEEIRKEVERLLRKWKEDNKEMRKRIRELLEDWRKKVEDSKKRAKDLIDEVKKRR

SEQ ID NO: 16208 - protein, 56 aa, Artificial Sequence
  Synthetic
TRELEKEAEDALRRLKKLIEEDRRELEKILKELEDLMREDTKENEKILREAEERSR

SEQ ID NO: 16209 - protein, 60 aa, Artificial Sequence
  Synthetic
SVEDEIRRLTEEIERTLRRWREEVKRSEDRAEESIKRSDEKNKESKERLDKVLDEARRRR

SEQ ID NO: 16210 - protein, 56 aa, Artificial Sequence
  Synthetic
LRELLKEVEDVLEELKELIKRDTEENKRILDEHKRLTEEDEKRNREVLERLKRKTD

SEQ ID NO: 16211 - protein, 60 aa, Artificial Sequence
  Synthetic
ESEETLKEVKKEIEKLIKRAEEINRESAERLKRILEEWKKEVDRSEKRLREVLDEVRRRR

SEQ ID NO: 16212 - protein, 56 aa, Artificial Sequence
  Synthetic
RRELLEELKRVLDRLKKLIDDDRRKNEKVLRDLEKLMREDADENREVLKRLEDKAR

SEQ ID NO: 16213 - protein, 60 aa, Artificial Sequence
  Synthetic
SDEERVIKEVEDLIRRIREDNKRLLDEAEKIIRRVAEDNKKLVEDHRRMLRKIDEEAKRG

SEQ ID NO: 16214 - protein, 55 aa, Artificial Sequence
  Synthetic
EDVKRLEEKVRKLLEESKRKLKRLAEEVRKLIKDSRDKIRELERENKEIIKKVKD

SEQ ID NO: 16215 - protein, 60 aa, Artificial Sequence
  Synthetic
DREKEVVDTLRRLIEDARRDNKDLVETHRRLLEDLERDNRELVRTHEERLEEIERRARRG

SEQ ID NO: 16216 - protein, 55 aa, Artificial Sequence
  Synthetic
EDVRRLEKEVEELLRESDRRVEDLERKNREILKRSEDLIRRLKEENRRIIEKVRK

SEQ ID NO: 16217 - protein, 59 aa, Artificial Sequence
  Synthetic
DDERRVVEELERMIRELEKKIREIVKRHEEALKRLKEDNDELSKRHKKMVEEIKRRADE

SEQ ID NO: 16218 - protein, 55 aa, Artificial Sequence
  Synthetic
EEVRRLKREVEELLKRAEELLKRLEDRNRKILRESEEDIKRLERENREIITRVRT

SEQ ID NO: 16219 - protein, 61 aa, Artificial Sequence
  Synthetic
KELDEIIRRVEELIKDDERRNREVLKRSDESTKESHDKARRILEESEKTTEDIKRKVEKDG

SEQ ID NO: 16220 - protein, 56 aa, Artificial Sequence
  Synthetic
EDKIRRLERESRELLRDSEDKVRKSKRKDEENLKRIEEEARRSEKRDEELLREAAK

SEQ ID NO: 16221 - protein, 61 aa, Artificial Sequence
  Synthetic
RELDEIIKTLEKLIEDSHREAREIVKEVKKRLDDDKRRNEEVLKESRETTERIRKEIEERG

SEQ ID NO: 16222 - protein, 56 aa, Artificial Sequence
  Synthetic
EEKIRRLEERARRNVEEMRKLAEELEKESRRILKESAEAVKRSKDEDRKLLEEAKK

SEQ ID NO: 16223 - protein, 59 aa, Artificial Sequence
  Synthetic
SETDKVIEESEKTNRDIKRHSEEVVKDSKRTNTEIERTVEKMIRELEEILERIKRLADN

SEQ ID NO: 16224 - protein, 56 aa, Artificial Sequence
  Synthetic
KDKAKKLKDETDRILETSERLLKALRDETDAIKRKVEELVRRVKEELDRILKKTED

SEQ ID NO: 16225 - protein, 59 aa, Artificial Sequence
  Synthetic
SETDRVVEESERTNKEIERHSEEMVRDSERTNKEIEEHSREVIERLREILERIERLVRK

SEQ ID NO: 16226 - protein, 56 aa, Artificial Sequence
  Synthetic
EEKMRRLKEETDRILDKSRRELKRLKDETDKLLEDSERLLREVEKTLRRILEEARK

SEQ ID NO: 16227 - protein, 59 aa, Artificial Sequence
  Synthetic
SETEEVVKTLKRLLEEIKKHSDDAVRKSEETNKRIREEVERVIKRLKELIEEISELVKS

SEQ ID NO: 16228 - protein, 56 aa, Artificial Sequence
  Synthetic
EEKLKRLKDALDRILEESKRLADELKKRTKDILDEAKDALRKIKEELDKLVEDAER

SEQ ID NO: 16229 - protein, 59 aa, Artificial Sequence
  Synthetic
SETDKVVREVEELIRRLEEHSRRVVEKSERTNEEIERHSRDVIRRSKEINDRIEELARN

SEQ ID NO: 16230 - protein, 56 aa, Artificial Sequence
  Synthetic
KDKMKRLKEELDKLLDDSRRLMKRLKDETDKILDKSRDLLAKTKRESDRILEEAER

SEQ ID NO: 16231 - protein, 59 aa, Artificial Sequence
  Synthetic
SETDKVVDDSRKTNEDIKRHSEEVIRRLEELIREVEEHSRRVEDEVRRILDEIRKLAED

SEQ ID NO: 16232 - protein, 56 aa, Artificial Sequence
  Synthetic
KDKATELKKDTDRILKESEDALRRIKKELDDLLRTSKRLAEELKKELREILERAKR

SEQ ID NO: 16233 - protein, 59 aa, Artificial Sequence
  Synthetic
SETDEVVERLEKILKDIREHSERAIKKLEDILREIERHSRKVIRDSERINTEIKKLAEA

SEQ ID NO: 16234 - protein, 56 aa, Artificial Sequence
  Synthetic
KDKLTTLKKKLDDLLDTSRRLVEKVEEDLRRILEASKRMLEETKKRSKEILDRIRK

SEQ ID NO: 16235 - protein, 59 aa, Artificial Sequence
  Synthetic
SESEEVVREVDKILKEIRKHSKDVIEKLKKLIDDIRRRVRKVIRDSEEINKRIEDLARE

SEQ ID NO: 16236 - protein, 56 aa, Artificial Sequence
  Synthetic
EEDMRRLKERLDKILDDSREMLKRLKDELDEVLEEVERLLRETKKRSDEILKRIKD

SEQ ID NO: 16237 - protein, 60 aa, Artificial Sequence
  Synthetic
SEIEDVIRRAEELIKEDKKRVEDVVREIEKLIRDDARKVRRAIEELKRLLREIEERVREE

SEQ ID NO: 16238 - protein, 56 aa, Artificial Sequence
  Synthetic
KEEAERLRRELEDLHRDVKRLIDELEKDLRRLLEESKRRADRVKEELRRLREEVRK

SEQ ID NO: 16239 - protein, 60 aa, Artificial Sequence
  Synthetic
SEADKAAEDAKRLIDKDREDVERAVKRAEDLIEKDREDVDRAIKESEELNKRAEDEARRR

SEQ ID NO: 16240 - protein, 56 aa, Artificial Sequence
  Synthetic
EEKARRLKEEADKVAKESKELADRLKERADRLHKRARELAERTKEDTDRLVEEAKR

SEQ ID NO: 16241 - protein, 60 aa, Artificial Sequence
  Synthetic
SEIDEVVKEIEKILEDDKRRVDEAIEELEKLIREIREEVRRVIKESEDLNKEIRDRVRKN

SEQ ID NO: 16242 - protein, 56 aa, Artificial Sequence
  Synthetic
KDKAERLRRELKKIMEDSRRLADEIKKRLDRLLEEVKEEIERTKRETDRLLEEVRR

SEQ ID NO: 16243 - protein, 60 aa, Artificial Sequence
  Synthetic
SELDRVVEEIDRLIREDEKEVRDMIRESEKLNRENEETNRKLLEDWDKLSKDIRDRVDKN

SEQ ID NO: 16244 - protein, 56 aa, Artificial Sequence
  Synthetic
DKKARELKEKLDELKKRSEKLLEDTKRETDKLHERSRRELEKLRRKDEELVKRVKD

SEQ ID NO: 16245 - protein, 60 aa, Artificial Sequence
  Synthetic
SEIEEVVERIERLIKRIKEEVERALKESEDLIRDIERRVRELLEEWDRLSERIREVVERN

SEQ ID NO: 16246 - protein, 56 aa, Artificial Sequence
  Synthetic
KDELRRLKEELRKLLEDVKKLLEESKKKTDDLLKRAEDELRKLKEKDDDLLRKVKD

SEQ ID NO: 16247 - protein, 61 aa, Artificial Sequence
  Synthetic
EELDRVVEELDRLIRDNKRRNDEALKESDRLIRENERRNRKAARDWEELSKEIEDRVRKNK

SEQ ID NO: 16248 - protein, 56 aa, Artificial Sequence
  Synthetic
KDKLTTLRKKLDDLHKESRRELERSKKKTDDLHRKSREEVRKLREDDERKLREIKK

SEQ ID NO: 16249 - protein, 60 aa, Artificial Sequence
  Synthetic
SEADEAAKKIEKLIEDNERKNRKALKEWDELTRENEKRNRDAIKESEDLIKEAADEVRRR

SEQ ID NO: 16250 - protein, 56 aa, Artificial Sequence
  Synthetic
EEKARRLREEAEELHRRSEEAARRAEKKDREAHKRSREAIKRTKDDTEELLKEAER

SEQ ID NO: 16251 - protein, 61 aa, Artificial Sequence
  Synthetic
DEIDKVVRKIEKLIDDNRRENEEMLRESEKLLKENEKKNEKAIRESEELIRRIEKRVRENK

SEQ ID NO: 16252 - protein, 56 aa, Artificial Sequence
  Synthetic
KDKARRLEEELKELHKRSKEELEKSKEKTDRLHDKSRRLIEETERRTEELLERVRR

SEQ ID NO: 16253 - protein, 60 aa, Artificial Sequence
  Synthetic
SVEDEVERLERDAEEISRRSETELRRLKKEVEDLNRESKKLLDELREEMEKILKKVREDS

SEQ ID NO: 16254 - protein, 59 aa, Artificial Sequence
  Synthetic
KDEVKRLVEEIERLLKRAEELSRELVRRIEKLIRELAEESRRLVDEIREVLKRLKDRAD

SEQ ID NO: 16255 - protein, 60 aa, Artificial Sequence
  Synthetic
SEIETVLEKLKRLLEEDRELVKRVEDKIRRIIEEDEKTVRDIKKRLDDILREIRDVLEKR

SEQ ID NO: 16256 - protein, 56 aa, Artificial Sequence
  Synthetic
EEELKKVEDELDRVRKETERIIKELREELEELHKRARDLLKEVRDELRKLLEEAKK

SEQ ID NO: 16257 - protein, 60 aa, Artificial Sequence
  Synthetic
SEIEDVVRRIDELLREDKRRVDEVLERNRKLIEDDERLSREIARELDEIIKRLREVVKSN

SEQ ID NO: 16258 - protein, 56 aa, Artificial Sequence
  Synthetic
REEVRKLKERLDKILEDTRRLLEESKRRLDRLHERHRETSEDMKRRIDKLLEEVRK

SEQ ID NO: 16259 - protein, 60 aa, Artificial Sequence
  Synthetic
KEAEDVVREVEELIDRDRKLVERVLRENERLLKEDRDTVKKVLEELEEILKDIERVVRER

SEQ ID NO: 16260 - protein, 56 aa, Artificial Sequence
  Synthetic
EELLRRLKEEIERLLERSRRLVKESEERLDRIREETKRELDRVEEKLRRLLEEVKR

SEQ ID NO: 16261 - protein, 60 aa, Artificial Sequence
  Synthetic
SEIEKVVEEIKKLLKELKETSERILRRNEKIIKEIEETSREVLKELERILEEIEDVVRKR

SEQ ID NO: 16262 - protein, 56 aa, Artificial Sequence
  Synthetic
KDRLKRLRDELERILRDHERLSRESKDKLDKLLERHKELSDEVRKKLKELRDRADT

SEQ ID NO: 16263 - protein, 61 aa, Artificial Sequence
  Synthetic
REIEEVEKEIERIIERIERTSRRVKEENDRLLEEIKRRSEEVKKRNDDIIREIRRVVEEDK

SEQ ID NO: 16264 - protein, 56 aa, Artificial Sequence
  Synthetic
ERRLKELKRKLDKLREDHERLSRRSDEELRRLEEEHKRLSEDSKRELDKLLDEVRK

SEQ ID NO: 16265 - protein, 60 aa, Artificial Sequence
  Synthetic
DEIERVLEEAKKLIRDLEEHSRRVEEENKRLLKEIRETSERVKRELDRILEEIRKTVERR

SEQ ID NO: 16266 - protein, 56 aa, Artificial Sequence
  Synthetic
DEKLRRLEEELKRLLDESKRLLEESEDELRKLEEEHRKLSEEVKRRLDELKKEVET

SEQ ID NO: 16267 - protein, 60 aa, Artificial Sequence
  Synthetic
REIEEIVERVKEIIDRIRRHSKEVEKENEKIIERIRRRSEEVLRTNEKALRDIERRVRER

SEQ ID NO: 16268 - protein, 56 aa, Artificial Sequence
  Synthetic
KDELKRLKEELERLLRESKKLVDESKRRLEELLREHRELSKRSRDKLDELLRRVEK

SEQ ID NO: 16269 - protein, 60 aa, Artificial Sequence
  Synthetic
SEIEEVVRRIREIIEEIRRLSEAALERNKRIIDEIRRTSKRVKEEIERIIRDIRRVVEER

SEQ ID NO: 16270 - protein, 56 aa, Artificial Sequence
  Synthetic
REDVRKLKEDLKELLKEHKRLSEESKKRLERLLEEHERISEELKRRLEKLLKEAED

SEQ ID NO: 16271 - protein, 60 aa, Artificial Sequence
  Synthetic
SEIEEVVKKVKKIIDEIRERSREALERNEKILEELKRHSEEVTRRAEKIIEEIKRVLEKR

SEQ ID NO: 16272 - protein, 56 aa, Artificial Sequence
  Synthetic
KDELTKLEKELEDLREEHRKLSKDSKDRLKKLLDESRELIERLKEKLKRLLEEAER

SEQ ID NO: 16273 - protein, 59 aa, Artificial Sequence
  Synthetic
SEVEEMLKRLDDILKKHRELVKEMKEELDRVIETHRRLVEEVRRRLEKSNDEIDKLVKA

SEQ ID NO: 16274 - protein, 59 aa, Artificial Sequence
  Synthetic
ERVEKALKEVRERLERSHKKAKEDLDRVREEARKSHEDVKRLSEEDRKKSEDLADEVRR

SEQ ID NO: 16275 - protein, 59 aa, Artificial Sequence
  Synthetic
REVEEALERLRKLIEDDRELVKRAKEKLDKLLKDDRKLVEDVLRELKRSNDEVKKLVDS

SEQ ID NO: 16276 - protein, 59 aa, Artificial Sequence
  Synthetic
KRAEEELRRVKEEVDRVLEESKRRLDEVRRRLERIEEESRTKSEEDRKRSEDLVREAER

SEQ ID NO: 16277 - protein, 59 aa, Artificial Sequence
  Synthetic
SEVERLVEDAERVIDEHRKLVTEMERRLERVNREDEKLVRKVLEELKKSNEEIKKLRED

SEQ ID NO: 16278 - protein, 59 aa, Artificial Sequence
  Synthetic
ERAKKLLDEIRKKLDDSNREVEKRSRDDERHTERVVRESKRLSEEDKKRSDELADETRK

SEQ ID NO: 16279 - protein, 59 aa, Artificial Sequence
  Synthetic
SRVEEVKKELDDLIRRHKELVEKVRKELKDLLDKHERLVEEAKKEIEKLIETLKRLAEN

SEQ ID NO: 16280 - protein, 59 aa, Artificial Sequence
  Synthetic
RRAEDELRKVRKEVERSNKEVEEILDDVRRKVEESDKRVKEILKKLREDVKKLLDEVRK

SEQ ID NO: 16281 - protein, 59 aa, Artificial Sequence
  Synthetic
SEVEKLVADADKLIKDHRKLVEEAKKRLDEVNERHRRLVEEVERRLDKSNKELEDLVRS

SEQ ID NO: 16282 - protein, 59 aa, Artificial Sequence
  Synthetic
RRADEELRRISERVKRSNEDVRKKSEDDKRHTDESDRDVKRLSKEDRERSETLMDRVRE

SEQ ID NO: 16283 - protein, 59 aa, Artificial Sequence
  Synthetic
SRVEDVERELEEEIDKHRKEVEDAKRRLDELIRRHKEEVKKLKKKLDDLIEELERLARN

SEQ ID NO: 16284 - protein, 59 aa, Artificial Sequence
  Synthetic
ERAKRSLDRVREKIEKSDRTAKDLLKKVEEEVRKSNERVKELLKRVKDAVDDLLRRRRK

SEQ ID NO: 16285 - protein, 59 aa, Artificial Sequence
  Synthetic
DEVEEVVKRAEDVIRTHKELVKKAKEDLDKIIEDIERELKKMLEDLERSNRRVEELVRG

SEQ ID NO: 16286 - protein, 59 aa, Artificial Sequence
  Synthetic
ERVKKILDDIRRELEESNKKVEEDLRKAEEDLEELLRRARELSKEDEKKSRKLVEDARR

SEQ ID NO: 16287 - protein, 59 aa, Artificial Sequence
  Synthetic
DEVDEVVKRLEDIIRKHETLVKKAKEDLDRVNEEDTKLIRDVLRRLKESNEEMERLVRS

SEQ ID NO: 16288 - protein, 59 aa, Artificial Sequence
  Synthetic
ERVKEELRRVEEDVKKSDEDARRLSKEDRDHTRENFKRSEELSRRDEETSRRLMEEVKR

SEQ ID NO: 16289 - protein, 61 aa, Artificial Sequence
  Synthetic
KDVEDLVRKAEELLKRHREDVTRLLERLKKVNKDHERLVKELKRRLEELLREVRELVERDG

SEQ ID NO: 16290 - protein, 59 aa, Artificial Sequence
  Synthetic
DEVERRLRRLEEELKKSHEEVERRLDEVRRHSKRSHDELRKVLRKLEEDLRRLAEEVKT

SEQ ID NO: 16291 - protein, 61 aa, Artificial Sequence
  Synthetic
SDLEELVKRAEKLLEEHKELVKRLEDRLRELDKRHKEIVERLRKELERLLREIRRIVEEKG

SEQ ID NO: 16292 - protein, 59 aa, Artificial Sequence
  Synthetic
DEAKRKLDELEERLRRSNKELEEKSEENERRTRESNEELERRLEDVRRKLERLREEVER

SEQ ID NO: 16293 - protein, 61 aa, Artificial Sequence
  Synthetic
KDVEDLLRRLEEIIKDHRREVEELLRELTKLDEEHKEEVRRLTEELERLLDEARRLVEEKG

SEQ ID NO: 16294 - protein, 59 aa, Artificial Sequence
  Synthetic
DEAERELERVEREVRKSSDKLRRDSKRNKERTRKSNEELERRLEEVERELRRLVAEVEK

SEQ ID NO: 16295 - protein, 60 aa, Artificial Sequence
  Synthetic
KKVEDLEERLERLLRDAERRVRELLDEARRLLETHRELSKRLLERLEKVNRDIREKAKEK

SEQ ID NO: 16296 - protein, 56 aa, Artificial Sequence
  Synthetic
ERLLRRVEKEVEDLLRTVKDLLRRIEEEVRKSLEESKKLLKEVEDHSRKLLEEIRK

SEQ ID NO: 16297 - protein, 60 aa, Artificial Sequence
  Synthetic
DEDEEVLRRLKELLKTHRKLSEDLLREAEAINEDHRRLSEELLRRLEKLNEEIRRKAKEK

SEQ ID NO: 16298 - protein, 56 aa, Artificial Sequence
  Synthetic
EELLRRVEEEVKKSNEESKKKIKELEEHSRRSNEESERRLREVEEHSRRLLEEIRK

SEQ ID NO: 16299 - protein, 59 aa, Artificial Sequence
  Synthetic
SEVEDIVRKVDEIIRRLERHNEELRKRVEEVLDRLRRHNEKLDRDVKEIIKEIERVIRG

SEQ ID NO: 16300 - protein, 56 aa, Artificial Sequence
  Synthetic
KDLLREIEEKVRRLVRKSEELLRRIAEDVKKVIEDSKDSHKKIEDELRELEERLRK

SEQ ID NO: 16301 - protein, 59 aa, Artificial Sequence
  Synthetic
SEVEDIVRKVDEFLERLKEHNRKLDKEAKELLDRLKRHNEKLDEEAKRLIEEIKRVADE

SEQ ID NO: 16302 - protein, 56 aa, Artificial Sequence
  Synthetic
KDLLREIAEKAERVKEESKRSHDEIADEIRKVEEESERSHREIAEELERLSRRLKK

SEQ ID NO: 16303 - protein, 60 aa, Artificial Sequence
  Synthetic
KDVEDIVREVERLIKELREHNKELVDRAREVLKELKDHNEKLVEDVKRLIEDITRKIRAN

SEQ ID NO: 16304 - protein, 56 aa, Artificial Sequence
  Synthetic
KDLLRDIERKVEKLERDSRRLLREIEEEIRKVIERSKELLERIEKELRDLMRELRK

SEQ ID NO: 16305 - protein, 59 aa, Artificial Sequence
  Synthetic
KEVEDIVEDVKRVLDELRRHNEKLVREVDRLIRELDKHNKELDDRATEIIKRIEEVVRR

SEQ ID NO: 16306 - protein, 56 aa, Artificial Sequence
  Synthetic
KELLERIDEEVKRVEETSRRLLREIAEKVKTLKEKSKRSHEEIRRRLEELADEIRK

SEQ ID NO: 16307 - protein, 60 aa, Artificial Sequence
  Synthetic
SEVEEIVRRVEKLIEDLKRHNEKLVDEVKKVIDTLRKHNEDLVRRVEEVIKRIEEVIREN

SEQ ID NO: 16308 - protein, 56 aa, Artificial Sequence
  Synthetic
KDLLRDIAEKVKTLKEDSRRLLEEIADRVRRLEEDSRRLLEEIRKEVERLKEELKK

SEQ ID NO: 16309 - protein, 59 aa, Artificial Sequence
  Synthetic
SEAEEAAREAKEAIDRLEEHNKKLDEDAKRAIEEARKHNKELDERAKRALEEIEKAARD

SEQ ID NO: 16310 - protein, 56 aa, Artificial Sequence
  Synthetic
TDAARRIAEEVKKLEKKSEDSHRKIAEDVKKAEEDSERSHRDIARRAEEVKKKADD

SEQ ID NO: 16311 - protein, 60 aa, Artificial Sequence
  Synthetic
SEVEKIVREVEKLLEELREDNRDLVRRADKDLERMERHNRKLVKDVEDVLRRIEEVRRAN

SEQ ID NO: 16312 - protein, 56 aa, Artificial Sequence
  Synthetic
KDLLREIERKIREVEEKSRELLREIKKKLEDVARESRRLLEEIARKIEKLSDELRK

SEQ ID NO: 16313 - protein, 59 aa, Artificial Sequence
  Synthetic
SRAERIVEEVEKVITDLERDNRELVRDVRRLLERLERHNKELDDRITEIIKEILRLAER

SEQ ID NO: 16314 - protein, 56 aa, Artificial Sequence
  Synthetic
EELLREIKRKVEELEKRSKELLEEIARRVKEVEEKSRDSHRKIRERLKELVRKVRE

SEQ ID NO: 16315 - protein, 60 aa, Artificial Sequence
  Synthetic
REMEEVLKEAKELLKESNKKAREIDRKIKELLDDSHRKVKETVDRVKRRIEELDRKVKEV

SEQ ID NO: 16316 - protein, 56 aa, Artificial Sequence
  Synthetic
EEVLREVEKELEDNKRELRESHKEIARELERNKEDIDRLVEEIKRRIEELKKRIDK

SEQ ID NO: 16317 - protein, 60 aa, Artificial Sequence
  Synthetic
DEMEKVLKEAEDELRRVEKEVREVDKEAEELLERSHRKVRDIVRRVTEELKRLKDKVEKI

SEQ ID NO: 16318 - protein, 56 aa, Artificial Sequence
  Synthetic
REMLEKLRREVERVKKEVDDSHREIAKKVERNKKEIDKLVREVEREVEELKKRIDK

SEQ ID NO: 16319 - protein, 60 aa, Artificial Sequence
  Synthetic
SEVEEVLEDAKRLLKEVEKRVREIDRRAEDLLRRSHEKVRRIDKDVKRLLREVEKKVEEV

SEQ ID NO: 16320 - protein, 56 aa, Artificial Sequence
  Synthetic
EEVLKKVEDDVRRLDEEVRRSHEDIRKKVEDNKKRIDESHEEIRRLAERVKKEIRK

SEQ ID NO: 16321 - protein, 60 aa, Artificial Sequence
  Synthetic
SEDEKVVKEAKRLLDENRRENKEIDERAEKALEDSHRKVRKIDKEAKELLEKLRRDVEEV

SEQ ID NO: 16322 - protein, 56 aa, Artificial Sequence
  Synthetic
RELLDKVRREVERLKEESKKSHDRIREELRRNKEEIEKSHDEIRRRVEKLDDEIRR

SEQ ID NO: 16323 - protein, 60 aa, Artificial Sequence
  Synthetic
SEVEEVEREVRKLLKESNDKVREIDKEAKKRLKDVEDKAREIDERITKLLKDIEDEVRKV

SEQ ID NO: 16324 - protein, 56 aa, Artificial Sequence
  Synthetic
EEVLRKVEKEVEDNKKELDESHKEVKREVEEVRERIDESHKRIRERADRVKKKIEK

SEQ ID NO: 16325 - protein, 60 aa, Artificial Sequence
  Synthetic
KELEDVLEDVKRLLKESNDEVKEIDDRARRLLEESHRKSEEVDRRAEKRLREIEDKVRKS

SEQ ID NO: 16326 - protein, 56 aa, Artificial Sequence
  Synthetic
EEMLREVEERARKNKEDIEKSHDEIRKEVEDNIRRDRESHKRIEEEARRVMAEIEK

SEQ ID NO: 16327 - protein, 60 aa, Artificial Sequence
  Synthetic
SEVERVLKEADKLLKDNDEKNERVDREVEKLIRDSHEKSKKVDERAKRALDKLDDEVRKV

SEQ ID NO: 16328 - protein, 56 aa, Artificial Sequence
  Synthetic
EEMLREVEKKVETLKKKSDDSHKEIEEKIRRNIEEDDKSHERIREEAEKLKKKIDD

SEQ ID NO: 16329 - protein, 60 aa, Artificial Sequence
  Synthetic
ELEELMKKIEDDSKKNDEDTERLVKEIRDRSKRNREESKKLHDEDRREAKRVLDEARRDV

SEQ ID NO: 16330 - protein, 59 aa, Artificial Sequence
  Synthetic
EEDVRRAIEEVRRLLEKSHRDSRRVIEEVRRLLEKSHRDNRKVNEDSRRLLKKVREDAE

SEQ ID NO: 16331 - protein, 60 aa, Artificial Sequence
  Synthetic
SLEDLVREIREESERNKKETRKLLRRIEEESKRNLDESERLHREDKKRLEDIAERLERRV

SEQ ID NO: 16332 - protein, 59 aa, Artificial Sequence
  Synthetic
EDLVRKVITEVKRLLEESHKESREVIREIKELLEESHEKSKKVNEESKKLAEDVLRKAD

SEQ ID NO: 16333 - protein, 60 aa, Artificial Sequence
  Synthetic
SLEELLKKIREESKRNLDETRKLHREDKEESRKNLEESRKLHEEDRREAERVKRRADREV

SEQ ID NO: 16334 - protein, 59 aa, Artificial Sequence
  Synthetic
EKLVREVVERLRELLRESHERSREVNKRSRDLLRRSHEKSRRLNEESRRLLEEVERRVK

SEQ ID NO: 16335 - protein, 60 aa, Artificial Sequence
  Synthetic
SADELLKKLRDESEKNKDDTRKLLEELRRRAEKNKKDIEDLLREIEKKLREVLEDIKRKV

SEQ ID NO: 16336 - protein, 59 aa, Artificial Sequence
  Synthetic
EEEVKRAVDEVRRLLEESHKKSREVIKRIKKLLEDSHKKVREIVTELDKLIKEVEKKVE

SEQ ID NO: 16337 - protein, 60 aa, Artificial Sequence
  Synthetic
DLKELVDELRKKSDDNLKETERLVREIEKRLTDNKRESERLVREIEKELRDLRERIERTV

SEQ ID NO: 16338 - protein, 59 aa, Artificial Sequence
  Synthetic
KDEVRKAIKEAEELLKRSHEESRRVIERVRKLIEESHRKNREAIKRIRRLIEEIRKEVD

SEQ ID NO: 16339 - protein, 61 aa, Artificial Sequence
  Synthetic
SEIEKVREELKELLERDEREVKRVIDDLRRLIKDLRERVKEVNKRDDETVKEIKKVIEERG

SEQ ID NO: 16340 - protein, 56 aa, Artificial Sequence
  Synthetic
EEVAREVEERSRRVKRKLEELIREIKTELDRVREEIERLSKRDREKNERLREEARR

SEQ ID NO: 16341 - protein, 61 aa, Artificial Sequence
  Synthetic
SEIEDVLRELKKLLTDDKREVERANRDDERTLRDIRRKVEEAIKKLEDLLRDVKRRVDEEG

SEQ ID NO: 16342 - protein, 56 aa, Artificial Sequence
  Synthetic
KDVAEEVERESRKVEKELEDLSERDKERNDRILRTIEELIKRVEEEIRKVKEDVER

SEQ ID NO: 16343 - protein, 61 aa, Artificial Sequence
  Synthetic
SEIEDVLRKLRKLLREDEKRVEDANRRDRDTVRKIEKRSEEAFKESKETNKRIEDKVRKTG

SEQ ID NO: 16344 - protein, 56 aa, Artificial Sequence
  Synthetic
KEVVEEVRDDSRRVEEKLRRLSKEDKEENDKIRRRDRKLVEDLRRDSDRILRKVET

SEQ ID NO: 16345 - protein, 61 aa, Artificial Sequence
  Synthetic
DEIERVVEEVRELLERDKRRSDEVIERLKRLLEKDEEDVDDVIRRSKETNERIRDKIEKEG

SEQ ID NO: 16346 - protein, 56 aa, Artificial Sequence
  Synthetic
KEVVDDLKRLSKKVYDDNKELIDRVRERSREVLRRLKELADELRKLSEKIKRDADK

SEQ ID NO: 16347 - protein, 61 aa, Artificial Sequence
  Synthetic
DDIEEVVKEVEDLLRRDAEDVERAIKELRKLLEDDRDRVRKVNEESRRIIEEIRKAIERRG

SEQ ID NO: 16348 - protein, 56 aa, Artificial Sequence
  Synthetic
KEVVDKLREDSERVKKKAEDLVEEIRRASEEVKKEVDDLSREDEERLEKLKEDARR

SEQ ID NO: 16349 - protein, 60 aa, Artificial Sequence
  Synthetic
SEAEELEDRIRKLLREVEETSRRILKRARELNKRIEEESRRIIKRIKELIDEIKELVRTR

SEQ ID NO: 16350 - protein, 56 aa, Artificial Sequence
  Synthetic
ERLLRKLEREVRRLSEEVTRLDEETRRHSDDLRRRVERLDETTRRELEKLADEVRK

SEQ ID NO: 16351 - protein, 60 aa, Artificial Sequence
  Synthetic
SEAEELIKRAEDLIREIKKRSDDLVREMERLNEEIKRVSDEIIKRIEEVLEEIKKLVKKV

SEQ ID NO: 16352 - protein, 56 aa, Artificial Sequence
  Synthetic
RRLLEKLKRELKDLERRVREENERSKRHSEELVRRARKLNEKTDKDLKRLEEETRR

SEQ ID NO: 16353 - protein, 60 aa, Artificial Sequence
  Synthetic
REIEEVRKEVERVRKRYKDEVRKIVEDARRVLEEHKRRVEKLLEELERILREAKRLTDEG

SEQ ID NO: 16354 - protein, 56 aa, Artificial Sequence
  Synthetic
EDMLREIEKAVRELNEESKELLERIEREVRKSEERSKEVIKEIAERARKVVEDTKT

SEQ ID NO: 16355 - protein, 56 aa, Artificial Sequence
  Synthetic
SEAEKVLTDNRDTLRRLKEELKKVLDENRKTLEELDKRLEEVHKRHNEELDRIRKD

SEQ ID NO: 16356 - protein, 55 aa, Artificial Sequence
  Synthetic
ERVKEELKRIDEDLKRVVDRIKEKAEDIDRKLKKRVKEIMDKARESLKTLEERVK

SEQ ID NO: 16357 - protein, 56 aa, Artificial Sequence
  Synthetic
DEMREVLKRLRELVEELRRELEEVLRRNRETLKRLEEELRRVHKEHNDVLKEIRDK

SEQ ID NO: 16358 - protein, 55 aa, Artificial Sequence
  Synthetic
ERMKDELKKILDEARRVVERIDREAKRIDDELREVVERISRDAKRSLDELDERTR

SEQ ID NO: 16359 - protein, 56 aa, Artificial Sequence
  Synthetic
DEMREVLRELEDELRKIKERLKRVLDRSRELLEEWREELERVHRRNEETLRRIEKN

SEQ ID NO: 16360 - protein, 55 aa, Artificial Sequence
  Synthetic
EEIKRRAEDILRELRRLVEELERRNEEINRRLAKRIKELMEKIRREDERLKKEVE

SEQ ID NO: 16361 - protein, 60 aa, Artificial Sequence
  Synthetic
DKAKRVRTELERRLEKLKRDARKVIEEHEKSLRDLEEEVRRVREEHERSLKELKEELDRK

SEQ ID NO: 16362 - protein, 55 aa, Artificial Sequence
  Synthetic
EDVTRELERVLDELRREVDRVRRELEKIDRELRELVKRIEDELRKINKELKEKSD

SEQ ID NO: 16363 - protein, 61 aa, Artificial Sequence
  Synthetic
DEVEELVKTVRKLVEDHNRKLEEVVRRLREIVKELEDRTRRALEEARRTVKRIEEEVRKRG

SEQ ID NO: 16364 - protein, 56 aa, Artificial Sequence
  Synthetic
ERLLRELKDLLEKSKRRVDELVKEIEKRNRDHKEKVRKIVDEIRRLLRELEERVKK

SEQ ID NO: 16365 - protein, 58 aa, Artificial Sequence
  Synthetic
KLEEILRRIRELLKRHHEKNKKILDDIREKSKKLKKKVDDILTRITEIIKDLEREVDG

SEQ ID NO: 16366 - protein, 59 aa, Artificial Sequence
  Synthetic
ERVLEDLRRKADDIIRRADEESRKIKEEADDIFRRSDELLKRLEDEAKRIADEVRKKTK

SEQ ID NO: 16367 - protein, 59 aa, Artificial Sequence
  Synthetic
DSDRIEETIKKLLKELSDKSKEVLDEIRKRLKDHHDRNRKVLEEIRRILKRLEEEVRRK

SEQ ID NO: 16368 - protein, 59 aa, Artificial Sequence
  Synthetic
KRALKEMLDRVRKIIKEYEDSLRRLKEEVDEIIERADRLSEELRRKAEKIIRDITDAVR

SEQ ID NO: 16369 - protein, 58 aa, Artificial Sequence
  Synthetic
DSEELLREIRKRLEDLSRKSEEIKRRIDEISRDLERKVEEIKKRIEELVRRVRTEADK

SEQ ID NO: 16370 - protein, 59 aa, Artificial Sequence
  Synthetic
RKVLERIREEADEIDKDYDRLLKEIRKKIEDIARDTERRLRELKDRVDKIIKKVEEDER

SEQ ID NO: 16371 - protein, 57 aa, Artificial Sequence
  Synthetic
REIETVTKKSRDLNREIDKKLKELTERVDKLIEEWKRKTDRVREEAKRAVKEIEDKN

SEQ ID NO: 16372 - protein, 59 aa, Artificial Sequence
  Synthetic
EELRRVIEESKRSNDELKKKADELSKRVKEALDRLEEEDKRVLEEIKDILRELRERRRK

SEQ ID NO: 16373 - protein, 56 aa, Artificial Sequence
  Synthetic
SEIEEVEKKSRELNRRVKERLDEVEEESRRLNEKWERDTRRVRERVEEEIKKIEER

SEQ ID NO: 16374 - protein, 59 aa, Artificial Sequence
  Synthetic
EKLDEVLKRSEDSNRELKRRAEELLRDSERTNEELRRRDEEVKREVEEKLKELEKEIRR

SEQ ID NO: 16375 - protein, 58 aa, Artificial Sequence
  Synthetic
SSKEILKEIDERVEELKRRNEKVDREIKEKVKRLEEENEKVDREIKEILKELEKEAEK

SEQ ID NO: 16376 - protein, 59 aa, Artificial Sequence
  Synthetic
EEVLERLRREVRKRIEDYKRKLDKIARDVDETIERYKRKLEEIKRRVEDEARKIKEEIR

SEQ ID NO: 16377 - protein, 61 aa, Artificial Sequence
  Synthetic
SRKEELKRRLDEALKKYEADLDELRRRHEEDVRRSKEENERLLKELEDAVRRAKEEVKKAG

SEQ ID NO: 16378 - protein, 56 aa, Artificial Sequence
  Synthetic
DRRVEKEIREAIERLKRNLERIKRNIEKVREDSKRVNKELRDKIREIIERIDRRLK

SEQ ID NO: 16379 - protein, 61 aa, Artificial Sequence
  Synthetic
SRKEKLLDDARKILKRAEEELKRLYDKHRRIIEEVKRDLERLKKEHEDVVRRVEDVLRKRV

SEQ ID NO: 16380 - protein, 56 aa, Artificial Sequence
  Synthetic
DKELEEDIRRIEDRLRRLLEELEKLIEDSMRELKRVLDELEKHIREVDEELEEDLK

SEQ ID NO: 16381 - protein, 64 aa, Artificial Sequence
  Synthetic
SEAERVKRELDEALKKAKKALEDNKRKLEEALRKHREDAKRWKEELEKALKEAEKAAKDLRRDA

SEQ ID NO: 16382 - protein, 55 aa, Artificial Sequence
  Synthetic
KEAERKLRELEKRAKEALERSKEHSDELEERARKANKEIEDKLKRLAEEAEKEAR

SEQ ID NO: 16383 - protein, 56 aa, Artificial Sequence
  Synthetic
SEAEKIKKDLDKIREDLKRLDREAEERVRRLSEELDRKDRELRKRIDEILKRMRDE

SEQ ID NO: 16384 - protein, 59 aa, Artificial Sequence
  Synthetic
DEDLKRLEDELRKVEEDNRRTLEELRRRVEEVSRRNKESLEDIRRKLEEAIRRLREKTR

SEQ ID NO: 16385 - protein, 56 aa, Artificial Sequence
  Synthetic
DGAEEVDDRLKKADEELRRKDKESDEKTKRIAEELRKLLEESKKKTEDLVRRLDEE

SEQ ID NO: 16386 - protein, 59 aa, Artificial Sequence
  Synthetic
EKRLRELEKKVEDVSRTNKKTLEDNRKKIAEVVKRLDEEIKRNKDTVRRVVERVKKDTD

SEQ ID NO: 16387 - protein, 60 aa, Artificial Sequence
  Synthetic
ERKERLKERLDEVKKEHERLVERWHRENREVLRENRETVERLERELERVLRELRDALREQ

SEQ ID NO: 16388 - protein, 56 aa, Artificial Sequence
  Synthetic
DEELEKRIEEVERKLRDTNRKIEELLKRLKKRHEEVDRELERLLEKLEREAEETRR

SEQ ID NO: 16389 - protein, 61 aa, Artificial Sequence
  Synthetic
SEEEELEKELEKVLRENEESVRRLHKRNRDVLKKNRETLEKLEEDLKRVLERLKRALDRKN

SEQ ID NO: 16390 - protein, 56 aa, Artificial Sequence
  Synthetic
EKEARDEVRRLKKKMDDVDKDVERLVRELEKEHEEVDKDLRRKLDEVRKELEDARR

SEQ ID NO: 16391 - protein, 57 aa, Artificial Sequence
  Synthetic
SEEERLEKELDEVLEDHKRRVEEWKKKMDEVNKKHKESIDRLREELDRVLDEVRKAG

SEQ ID NO: 16392 - protein, 60 aa, Artificial Sequence
  Synthetic
REEALKRLEELVRKLKEKLERINRRIARIVDKNTKEIKDTNDTLRKEVRDLMKELKDRTR

SEQ ID NO: 16393 - protein, 57 aa, Artificial Sequence
  Synthetic
REDEEVKKELRKILEDHKRRVEDWKRRLKKNLEEHRRRVEEWKRRLDELLEKVRRAG

SEQ ID NO: 16394 - protein, 56 aa, Artificial Sequence
  Synthetic
EEEIKRVIERLARDARRINERLRELLERLSEISERINREIEKIIDEARERLEREER

SEQ ID NO: 16395 - protein, 57 aa, Artificial Sequence
  Synthetic
SEKEEVKKRLKDNMRRAEELIRRDDREVEENRKRHDELVKEWDKRLREILKKAEDSG

SEQ ID NO: 16396 - protein, 56 aa, Artificial Sequence
  Synthetic
EKEIKEVLEELSRTSKRLIEDSKRSSERLSERSKRTNEEIERIVRAAKRTIEERER

SEQ ID NO: 16397 - protein, 60 aa, Artificial Sequence
  Synthetic
SVAEELEERLKEIKRESEKSIRDLRRLLEEIERRLRDINRKLDEIVKRVAEKIKDAETKG

SEQ ID NO: 16398 - protein, 59 aa, Artificial Sequence
  Synthetic
KKVVDDVERKLREIIRRHEEELKKIKEDLDKIREDHERLLREWKKELDELITRVAESAR

SEQ ID NO: 16399 - protein, 60 aa, Artificial Sequence
  Synthetic
SVSKKLDDELRKMEREIEKSNETIKKLIEDIRRRSKESRDRLKELLEEIKKRLKEAEERG

SEQ ID NO: 16400 - protein, 59 aa, Artificial Sequence
  Synthetic
EKVVEDIERRVEKVLTDHERELERVERELDDIIRRHEEELEKIERELEKIKEDVDRSAK

SEQ ID NO: 16401 - protein, 60 aa, Artificial Sequence
  Synthetic
DELDRLRELLEELKRRSETVIKEAEELLRKLERELRELIREWKEITERLARRMEDLSRKG

SEQ ID NO: 16402 - protein, 59 aa, Artificial Sequence
  Synthetic
REDLKRIEEELREILKRHRDANKRIKDEVEELLKRVEEMLRRLHEEDRKLLEDLKRETD

SEQ ID NO: 16403 - protein, 60 aa, Artificial Sequence
  Synthetic
RETEEVKKDVDRIRKASEDVARKMEKITRDVAKELRDLIEEWRRRSEELKKELEDLSRRG

SEQ ID NO: 16404 - protein, 59 aa, Artificial Sequence
  Synthetic
EDELKRIEEELRKILKEHEDKNREIKKENDRLNKEVEEEAEKATREDKRLLEKADRDRQ

SEQ ID NO: 16405 - protein, 57 aa, Artificial Sequence
  Synthetic
SEKEEIEKRLDKLLKEHEEENDKIRRTLKEINDRSKEEVERIEERLKDLLRRLRERI

SEQ ID NO: 16406 - protein, 56 aa, Artificial Sequence
  Synthetic
TKRARDRLEELRRESEELIKTARDLVRRSEKEHRDLIERLRRILEELREKLERKTT

SEQ ID NO: 16407 - protein, 60 aa, Artificial Sequence
  Synthetic
SVKEEVRTLLRRLERVSRELIRRLKEMLKTLHEENKKLIDDSRKLIRKIKRDLERVAERR

SEQ ID NO: 16408 - protein, 59 aa, Artificial Sequence
  Synthetic
KDTVKKVKEDLKDILRRHEEANERIRDELRRNLRKHEDDSKKSKEELDRILKKARDDAR

SEQ ID NO: 16409 - protein, 59 aa, Artificial Sequence
  Synthetic
DIEDELRKELEKHHTKSREVKRRLTELLKRHEDRVEEVERRLRKDLKELRDRIEELSKI

SEQ ID NO: 16410 - protein, 59 aa, Artificial Sequence
  Synthetic
EKVAREVEERLKRDHDDLRRVIEEIRKRLEDSHRELKKTIEDVKRRVEELIEEAERRMK

SEQ ID NO: 16411 - protein, 59 aa, Artificial Sequence
  Synthetic
SIREKLREVLERHHRTSRKVEEDLRRKLEDHHRKTREVAERLKEKVDRLREEIKRASRI

SEQ ID NO: 16412 - protein, 59 aa, Artificial Sequence
  Synthetic
ERVVRKIEKDLRDDHRRLKEIAKRIDDEARRDIKRLEEIIKKIEEEVDRLIEEVRRRDK

SEQ ID NO: 16413 - protein, 60 aa, Artificial Sequence
  Synthetic
DKDREIERLAKEAKDRHDKTLEDDRRRLEEVRRKIEETIRRIKKKLDEAKKRLKELVRDK

SEQ ID NO: 16414 - protein, 55 aa, Artificial Sequence
  Synthetic
EEILKELEEIVRRVEEKNKRLHDENEKDTRRVEAVLEDIKRRIDEIVRRLEERIK

SEQ ID NO: 16415 - protein, 60 aa, Artificial Sequence
  Synthetic
DEKDRIDKRMKEVLKKIEELIRRDERRLEKVRKDHEELVRRIEDELRRVLEELKKLVEEK

SEQ ID NO: 16416 - protein, 55 aa, Artificial Sequence
  Synthetic
EDIERKIRELEEKVERELKKIHDENEKLAEKARRDLERIEREIDKLVKDVEDAIR

SEQ ID NO: 16417 - protein, 60 aa, Artificial Sequence
  Synthetic
SEKDKITKTLEDAKRDHRKLVEEDEKALEEVERRHEEIVRRIEEKLKEAKEELDRLVRDK

SEQ ID NO: 16418 - protein, 55 aa, Artificial Sequence
  Synthetic
EKILREIEERIKEVKENLRRVHEENRELAKKVLKDLERILEEIKKIIKELRERVK

SEQ ID NO: 16419 - protein, 60 aa, Artificial Sequence
  Synthetic
SKKDEIEETIRRARERIKTIVDRIREELKRIRDKHKKLVDEDKKTLEEVLRTLRELVRDK

SEQ ID NO: 16420 - protein, 55 aa, Artificial Sequence
  Synthetic
DEILEKVKELVREVEEVLRRIEKEIEDLVRKVEEDLRRIHERNRELAKKADDDIK

SEQ ID NO: 16421 - protein, 60 aa, Artificial Sequence
  Synthetic
SKEEEIEKTLKKIEEDHRELVRRIERALDDARRRHKELVDRDDKELRDAERELDRLVREK

SEQ ID NO: 16422 - protein, 55 aa, Artificial Sequence
  Synthetic
EEILKEIRDLADEARRNLERILRDIERVVEKVERDLKRIHDKNKRDVERVRREVK

SEQ ID NO: 16423 - protein, 60 aa, Artificial Sequence
  Synthetic
KEKDDIDRDLKRAEEEHKRLVDEIRETLKEIEREHRERVKRIKEKLDEAKRRLEKLKRDR

SEQ ID NO: 16424 - protein, 55 aa, Artificial Sequence
  Synthetic
EKILEDIKREVDRVRKNLKEIKEKIDKEREDVKRDLDRIRKEIEELVEKVDRDVK

SEQ ID NO: 16425 - protein, 60 aa, Artificial Sequence
  Synthetic
DKARKIEEDIRRAEEEHKELVKRNEERIKEVAERHEETVRDIERKAEDIRRELKKLVDEK

SEQ ID NO: 16426 - protein, 55 aa, Artificial Sequence
  Synthetic
KEILDEVKKLVDEVRANLEKSHEDIERLVEKVREDLKRIEERLRKIAEDLRRRVK

SEQ ID NO: 16427 - protein, 60 aa, Artificial Sequence
  Synthetic
EEEREIEDTIRRAEEEHRKRVEDNKRRLEEAEKEHRKRVEDNKRRAEEIRRKLKELVDRK

SEQ ID NO: 16428 - protein, 55 aa, Artificial Sequence
  Synthetic
EEILKKVKELVDRVRRNLERSHEKIKRIEDKVRRDLERSHKELEDLMRRMEEEIR

SEQ ID NO: 16429 - protein, 57 aa, Artificial Sequence
  Synthetic
EKKERIEERAKEVEREHREIVKRDEEELERVREEHEESVRRDRKALEDVERDVRRDG

SEQ ID NO: 16430 - protein, 56 aa, Artificial Sequence
  Synthetic
MEDMLRKVKEVADENRERLKELHEENERTARRLRKLNRELHEENKRLVEEIKKEAK

SEQ ID NO: 16431 - protein, 57 aa, Artificial Sequence
  Synthetic
SKAEEIRKELDRVRREIEKRAEEDKRTLEEVRREHEKLVRENEETIKRVEEDVERAG

SEQ ID NO: 16432 - protein, 56 aa, Artificial Sequence
  Synthetic
MEDALREIKEVADEVRKKLRELHEKNKKLMDDNRRKLDKSHKDVREVEREIRERIK

SEQ ID NO: 16433 - protein, 57 aa, Artificial Sequence
  Synthetic
DKERRIEEELEKARRDHKEDVDRDRERLKEVREEHERLVRENKKRLEEIRKELEDRG

SEQ ID NO: 16434 - protein, 56 aa, Artificial Sequence
  Synthetic
MEDLLREVKRVVEKNKEDLKRLHDENEKLAEENRRRLKKSHDEVEKVAEDLKRKAK

SEQ ID NO: 16435 - protein, 57 aa, Artificial Sequence
  Synthetic
EKKERIEDDLRRVKEEIDDLLRKNEKRLREAEDEHRKRVEDDRRRLDEVRKEVDDEG

SEQ ID NO: 16436 - protein, 56 aa, Artificial Sequence
  Synthetic
MEDALRKLKRVADEIRKRLDESHKEIKKVVDDNRKKLEELHRKNRELERKIREDAR

SEQ ID NO: 16437 - protein, 56 aa, Artificial Sequence
  Synthetic
KDEERIKKKLKKLVDENRDLNRRIEETNRRVAEDLDRRLKEIEKRNRDMAEELRKS

SEQ ID NO: 16438 - protein, 55 aa, Artificial Sequence
  Synthetic
DEIRKRAEDAERETRETNRRIRDHTRRVAERVEKVLDEIRRHTEEVKKEVDEKER

SEQ ID NO: 16439 - protein, 56 aa, Artificial Sequence
  Synthetic
SDEERIKDKLEKLVKENEDKNRRILEENKRVADENRRLNEEIEKRLEEMVEELERR

SEQ ID NO: 16440 - protein, 55 aa, Artificial Sequence
  Synthetic
EEIRKRVKEAEDKTEETNRRIEKHHREVKKESEESNKRITDRLEEVKERVTRKRK

SEQ ID NO: 16441 - protein, 56 aa, Artificial Sequence
  Synthetic
KREEDIKRRLEKLAKENRERNEEIKRRLDELVDRNREENEKILRELEKMVRELERS

SEQ ID NO: 16442 - protein, 55 aa, Artificial Sequence
  Synthetic
EEARKRLEELKKETEDTNRRIDEAVERAKEETRRTNERIKEELKRVKKKVTDKRR

SEQ ID NO: 16443 - protein, 60 aa, Artificial Sequence
  Synthetic
SEVETAKEDLKKKVEENEKRIKDVEDKLRKTVEDNRKRLEDVLEELRRSVETLRDLLRKG

SEQ ID NO: 16444 - protein, 55 aa, Artificial Sequence
  Synthetic
EELEKRLREAEEKSDRLLRRLKEESRKAEEDSKRLLKELKEESRRAEEEVRRARD

SEQ ID NO: 16445 - protein, 60 aa, Artificial Sequence
  Synthetic
DEKEEAKERLKELRRRLEETDKRVDEELEKLMREMEDTDRRVKEKVDRSRREADEVLRRG

SEQ ID NO: 16446 - protein, 55 aa, Artificial Sequence
  Synthetic
EELKRRLRKVSEENKESNERLRRKVKRVVDENRRTNKELKETSKKVKEDIERKRK

SEQ ID NO: 16447 - protein, 60 aa, Artificial Sequence
  Synthetic
SELEEVTDRLRKLAEKARRLDKEYEEKSRKLKEEVERIDEDLDRLLKELTDEVREIAERG

SEQ ID NO: 16448 - protein, 59 aa, Artificial Sequence
  Synthetic
EEALRRIEKEIREVEKENRDTLERLRRHDEEVNRTNKETLDRLDEKLKRVEREIDERRK

SEQ ID NO: 16449 - protein, 61 aa, Artificial Sequence
  Synthetic
DEEEDLKEKVKKVETEHEETLKEIRRKLEDVKREHEKTVEEIRDHNRKVEERIRDVERRKD

SEQ ID NO: 16450 - protein, 55 aa, Artificial Sequence
  Synthetic
ERIRERLEELMRDARRLNRELDEKVRKLVEKARRDNTRVKKKSRELMKEIDDELR

SEQ ID NO: 16451 - protein, 61 aa, Artificial Sequence
  Synthetic
DEEEELKERIERVKDENRRSVERLRRELKRVEDDHRETVKDLERRLREVKKEIEELVRRKD

SEQ ID NO: 16452 - protein, 55 aa, Artificial Sequence
  Synthetic
EELKKKLEELMKEVRDLDRELKREVEELEREIRRLNKEIRERIEDLVRKAREAIR

SEQ ID NO: 16453 - protein, 61 aa, Artificial Sequence
  Synthetic
REEEELKKKLDDVRRENEESVKKIKEDIDRVRREHEKTVEEIRRHNKKVEEEIRAEVRRKD

SEQ ID NO: 16454 - protein, 55 aa, Artificial Sequence
  Synthetic
DRIREEIEKLAEEIRRLDERLEEELREIVRKMRELNRRVAEKSKELTEDARRRLK

SEQ ID NO: 16455 - protein, 60 aa, Artificial Sequence
  Synthetic
SEREEIRERLRRNLEELRKSIKKIEDDLRRLEKRHRDAVKEIEDRLRRLEEKLDEMAKRD

SEQ ID NO: 16456 - protein, 56 aa, Artificial Sequence
  Synthetic
REDVKRAVDEIHKHTKEKEDRLRKLLKDLEKNIEDAIRRLEKLLRDLEEEIKEAAK

SEQ ID NO: 16457 - protein, 59 aa, Artificial Sequence
  Synthetic
EESERILEKIRRAAEEDKERIRKAIEELRKLAEEDERKLRKANKEARDSARELRRLLKE

SEQ ID NO: 16458 - protein, 58 aa, Artificial Sequence
  Synthetic
EVVEEARRLIKKWREEVERLNEEIKKLVEDWDRRVKELNERHRDDDRKIEKEVEDEEK

SEQ ID NO: 16459 - protein, 60 aa, Artificial Sequence
  Synthetic
SELEKALEEIKRLAEDDMRRIKKVIKELEKLARDDEKRLREVIERLETEVRKLEELLKRG

SEQ ID NO: 16460 - protein, 58 aa, Artificial Sequence
  Synthetic
EVVDELRKRLKEVKERAEDLNRKLEELIRRWKERVERLNRELEKRMRDVEEKVRREEK

SEQ ID NO: 16461 - protein, 60 aa, Artificial Sequence
  Synthetic
SDLEKILEELKRLAEEDKRKLEEVIKKLEEAARKDAEDLKKVNEEAKKSARELEELLKRG

SEQ ID NO: 16462 - protein, 58 aa, Artificial Sequence
  Synthetic
EVVREIEELLKKIEEEVRRLNEELKRLADEWRREVRRLNEEHKDTDRRIKERVKRAEE

SEQ ID NO: 16463 - protein, 60 aa, Artificial Sequence
  Synthetic
KDMERMLKEIEDLARKLREELKRVLDELRKTAKRDEEELKKVNKEAKESARELEEKLRRG

SEQ ID NO: 16464 - protein, 58 aa, Artificial Sequence
  Synthetic
EVVKELRKLLKKIKDDVRRLDKELDELLRRWEESVERLNREHKKTDEKVEEDVKRTTT

SEQ ID NO: 16465 - protein, 61 aa, Artificial Sequence
  Synthetic
SEEEKVEKELRDLVREDDRRLREVEERVRKVVKEAEDDHRRVKEDIRRMVEEIRKKLDKDG

SEQ ID NO: 16466 - protein, 55 aa, Artificial Sequence
  Synthetic
ERLEDEVRKVEDRSRRMNERIDERLKRVEEESKKAIEELRRELERVKREVEERKR

SEQ ID NO: 16467 - protein, 61 aa, Artificial Sequence
  Synthetic
SEVEEVKKELEKLAREDEKRLEDVKEEVKESARRDKRRLEEVEEDLDRLVKELEDKLRDDG

SEQ ID NO: 16468 - protein, 55 aa, Artificial Sequence
  Synthetic
DELKRKLKRVEERSREVNRELRERDKKIEEDSRRINKRLKKKVDEVKEKVREDTR

SEQ ID NO: 16469 - protein, 61 aa, Artificial Sequence
  Synthetic
DEEEDVRRKLEELARRLKRRLEEIEKRLRDSVKEDRRKLEEVKEKLRELIKKLEDEIRKKG

SEQ ID NO: 16470 - protein, 55 aa, Artificial Sequence
  Synthetic
EKLKEDVERVKRDVRRVIRELEKTDERIERESRKVNEELKELVERVERSVKKADE

SEQ ID NO: 16471 - protein, 60 aa, Artificial Sequence
  Synthetic
DEDREARKKVEALLKEVEDRVRESKKRTKDLLREIEKRLRDTTREIDELRRRIEDLSRRG

SEQ ID NO: 16472 - protein, 59 aa, Artificial Sequence
  Synthetic
EEVLRELKELLDKIRETIERASKENEELLREIEKRIEDANRENTERLRRIEKRIDDDAR

SEQ ID NO: 16473 - protein, 56 aa, Artificial Sequence
  Synthetic
SEKDELRKRVEDIKETAKKVVEELREASRKIHEDNKRVNDRLRKESKRIKDKADKL

SEQ ID NO: 16474 - protein, 55 aa, Artificial Sequence
  Synthetic
ERAREEVRRIEKTIRDTARRVRERVRDSERRFRKLVREWEKLVEDSERKIDELSK

SEQ ID NO: 16475 - protein, 56 aa, Artificial Sequence
  Synthetic
SAKEEIKERVKRIEERLRRLLKELEEKVKRIHDENRKVNKELTDRSKEIKDRLKDL

SEQ ID NO: 16476 - protein, 55 aa, Artificial Sequence
  Synthetic
EEVREELKRIEERLDRTLREVRKTLEDIERRIRKAVEDWRRLVKESEERVKRLTD

SEQ ID NO: 16477 - protein, 60 aa, Artificial Sequence
  Synthetic
SEEERVRKDLKELHEHLKREVDKARKDLEDMHRHSEELAREVRERHERSKRELDELERRG

SEQ ID NO: 16478 - protein, 55 aa, Artificial Sequence
  Synthetic
EEIEERVRRNEDTLRRVLKELRERAKRNKDDIRRVLKELEDRSREIEKKLREAER

SEQ ID NO: 16479 - protein, 60 aa, Artificial Sequence
  Synthetic
TEEERARETLDRLNKHSKELVDRVREKLKRLVEHSRELLRRVDRKHKESEKRVREVSRRG

SEQ ID NO: 16480 - protein, 55 aa, Artificial Sequence
  Synthetic
DEIERRVERNKREIDKVLKELEERVRTNKDEIDKALEKLKRLSEEIKRKMREDET

SEQ ID NO: 16481 - protein, 60 aa, Artificial Sequence
  Synthetic
KEKEELDETIRRLEEHSKKKVDKVRKELKEMDEHSRDEARRVRREHEKSEEKVRRASEEG

SEQ ID NO: 16482 - protein, 55 aa, Artificial Sequence
  Synthetic
EEARERLRKNEEEIKKVLEELERRVRENKERIDDVERELEDLSRKIEEKLDRDDT

SEQ ID NO: 16483 - protein, 60 aa, Artificial Sequence
  Synthetic
KEEEEARRTLERIERRIRKALKEIDETLKRLNDHSAKRVKEVREKHEESRRKVDDVSRRG

SEQ ID NO: 16484 - protein, 55 aa, Artificial Sequence
  Synthetic
EEIRERVKRIKEEMDRALKRLKDKVKENKERIDEVLKDLRRTSKEIKERLDRSTK

SEQ ID NO: 16485 - protein, 56 aa, Artificial Sequence
  Synthetic
SKKEELERLLEEAKKKHEESERRLRESSKKLEEEIRRMKEHSKKSSEDAEDKLRRN

SEQ ID NO: 16486 - protein, 54 aa, Artificial Sequence
  Synthetic
ELLERIKDLVRRSEEENKKLLDEHRKIVKTLKERLEKLNEEHERIVREVERRTR

SEQ ID NO: 16487 - protein, 56 aa, Artificial Sequence
  Synthetic
SSEDELRRLLKEARDTHRESEKRLRDSSKRAEDMHEKSKEDVERSSRELEKELRRR

SEQ ID NO: 16488 - protein, 55 aa, Artificial Sequence
  Synthetic
ERLLDEVRKEMKRSEEENRRLLREHEEVVKKSIKENKELLDKHKEIEDRLREEIR

SEQ ID NO: 16489 - protein, 56 aa, Artificial Sequence
  Synthetic
SEKETLKRLLDEIKKRHKESEDRVRKLVEDAREELDRVADELRKSSEDLRRDLKRA

SEQ ID NO: 16490 - protein, 55 aa, Artificial Sequence
  Synthetic
SKLLREVEKLMEESRKRNEDLLKELRDIIEDLREKLRELLREHREAAKRLRDEIR

SEQ ID NO: 16491 - protein, 57 aa, Artificial Sequence
  Synthetic
DERETLEKLLKEVRDMHEESKKRLTDSSRKLREDLRRVKEELDKTLRDIEERAKEEN

SEQ ID NO: 16492 - protein, 55 aa, Artificial Sequence
  Synthetic
SRLLEEAKKLIEESKRENEELLKEHDKIVKELIKKLRDLLKEVEDRARDVTEEAK

SEQ ID NO: 16493 - protein, 56 aa, Artificial Sequence
  Synthetic
SSRETLDELLRRAEEIHRRSEEELRRSSEEVRRKHEKSERDLEKLLRDAEELLRRE

SEQ ID NO: 16494 - protein, 55 aa, Artificial Sequence
  Synthetic
DKLLDTVRKLVETSRDENRKLLEDHKKMVKESEDRNRELLRDLERVIEELSRRIR

SEQ ID NO: 16495 - protein, 56 aa, Artificial Sequence
  Synthetic
SEVEEILDRLRREVERSKKKVEDILRELKKLAEDTKEKVERVLDRNRKTIEELKKA

SEQ ID NO: 16496 - protein, 59 aa, Artificial Sequence
  Synthetic
EDLVTKLRDLLRRHHETLRRLAKELRDLLKKHHEELRRLIERLEKSLEDLERELDKTRR

SEQ ID NO: 16497 - protein, 57 aa, Artificial Sequence
  Synthetic
SEVEKILEDLKKLIKESKDEADRILTDHRRLVKETEEEARRALERNRKTVDDLRKAN

SEQ ID NO: 16498 - protein, 59 aa, Artificial Sequence
  Synthetic
EEALRELRRLLKEHHEILRKVEEELRRSDEEHHRRLEEVERRLRKSLRELEETVRETTR

SEQ ID NO: 16499 - protein, 57 aa, Artificial Sequence
  Synthetic
SEAERILEKLDRLVKETDRRVKEVLEDNRRTVRRLEEEVKRILKENRETARELEEAN

SEQ ID NO: 16500 - protein, 59 aa, Artificial Sequence
  Synthetic
EEVLRRLKKLLDEHNERLRRLERDLDRSLKEAKETLDELERRLEKSLRELKESVDRTRK

SEQ ID NO: 16501 - protein, 60 aa, Artificial Sequence
  Synthetic
SSEERLKEEFKRAAEKVRKVEEELRELHERVEKSSRDSKRRIRELLKRAEEEVKRVEDRG

SEQ ID NO: 16502 - protein, 55 aa, Artificial Sequence
  Synthetic
DEVLRDLKRLIEELEDKARRVLDKSRRIIERLRRKDEEVLRKLEKEIRELKKKAN

SEQ ID NO: 16503 - protein, 60 aa, Artificial Sequence
  Synthetic
DEERELRRLLEDVKRRVREVEEELRRLHEEIKRTSKRSKEELRKLHKELEDAVREMAKRG

SEQ ID NO: 16504 - protein, 55 aa, Artificial Sequence
  Synthetic
DKVLRDLEELVKELKRRLDEVLETSRREAEKLKRDDEKVLRESKKIMEDLRRRAE

SEQ ID NO: 16505 - protein, 60 aa, Artificial Sequence
  Synthetic
SEEDELRKLLEELRRRSKEVNDRLRKLHDELRRRVEDLKRKLRELHKEAAKIVEEMKARG

SEQ ID NO: 16506 - protein, 55 aa, Artificial Sequence
  Synthetic
DKVLEDLRRLVEENTRRLEEMLKRSEKIARDLLEDVKRFLDESKKKIDTLRRRAE

SEQ ID NO: 16507 - protein, 60 aa, Artificial Sequence
  Synthetic
SLEDELRRLLTEAEKRSKDVNERLRDLHREVRELSEDVNRKLEELHRELEERVKELKREG

SEQ ID NO: 16508 - protein, 55 aa, Artificial Sequence
  Synthetic
DEVLKKLKELVRRNEEELEKALKESKDIVEKNKRDLDEVEKKSREIVRELIERTK

SEQ ID NO: 16509 - protein, 60 aa, Artificial Sequence
  Synthetic
SLEETLEKLLREAEDISRKANKRLEEAHERIKRTLEDLERKLEKLNKEVRDRVERVKERG

SEQ ID NO: 16510 - protein, 55 aa, Artificial Sequence
  Synthetic
DKVLEKLKRLIEENKKRLERVLEKSDKILDDLRRKVEEVLKRLEKTVKDLEDEAR

SEQ ID NO: 16511 - protein, 61 aa, Artificial Sequence
  Synthetic
SEDEELLRRLEETIRRATERVKRLLDTLRKLAEDVRKELERLLDTHRELAKRIEDELREGR

SEQ ID NO: 16512 - protein, 55 aa, Artificial Sequence
  Synthetic
EEVERVLREVTKRLRDLKREHRKLLEKVKRELEKVEEDHRDSSRKLEEIIKEAEK

SEQ ID NO: 16513 - protein, 61 aa, Artificial Sequence
  Synthetic
SEAEKLAKDIREAAKRLREHAERDKEELKKAADKLRDEARRDAEKLKRAAEKLKDLARRTG

SEQ ID NO: 16514 - protein, 59 aa, Artificial Sequence
  Synthetic
EEAAKRIKELLDKARKDLEDAKREAEELNRRAREELEKAKKDAEDLNRRAKEELDKARK

SEQ ID NO: 16515 - protein, 60 aa, Artificial Sequence
  Synthetic
DDKDKLLEELRKVIEELEKKLEDNNRELEKVLEKLKREAERDLERLREMIRRLEELLRRD

SEQ ID NO: 16516 - protein, 59 aa, Artificial Sequence
  Synthetic
EEVLDRLRRIIEELRERLKRAEKSNRDILERIDRELEKLKRRAEELNEELRRRLKERRD

SEQ ID NO: 16517 - protein, 61 aa, Artificial Sequence
  Synthetic
SRTEEVLKELRTLMRELRRRLEEVIKELEKSAEELERIAREVAKRSRKVIEELKRKADKDG

SEQ ID NO: 16518 - protein, 55 aa, Artificial Sequence
  Synthetic
EELEDLLRRIRETLEDMKRRLDELDTELEKRLREVARTLDELHKELEETLRRLKK

SEQ ID NO: 16519 - protein, 57 aa, Artificial Sequence
  Synthetic
DAEDELRELSKRNKDEVREVKERLKKLSEENRRDLERVKRKLEKDSEENREALEREN

SEQ ID NO: 16520 - protein, 55 aa, Artificial Sequence
  Synthetic
EELKKRIEELIRRSRKLAEDLKKKLEDIHRETERLVRELAELVRDLHRRTKEKAR

SEQ ID NO: 16521 - protein, 57 aa, Artificial Sequence
  Synthetic
SAEDRLRELSKRNREEVEEVEKRLRELMERIRRRLREVKEDLRRLSEENRKTLERKN

SEQ ID NO: 16522 - protein, 55 aa, Artificial Sequence
  Synthetic
EEIEERIKRLIKESRDLARELEEKLRKLLEELEKLAKRLREKVKELHDDTERAAK

SEQ ID NO: 16523 - protein, 58 aa, Artificial Sequence
  Synthetic
SEEDELRELSRRNEEEVKKAKRDLEKLSRENEEDLKRVKRKLEKKSEDNRRILERDNR

SEQ ID NO: 16524 - protein, 55 aa, Artificial Sequence
  Synthetic
EEVKKKIEDLIRRSRELVERLKRKVEELHKTTKRLVEELEKTIDRIIEETRERAR

SEQ ID NO: 16525 - protein, 60 aa, Artificial Sequence
  Synthetic
SAEDELRRLLRENRERNKKADKDIKKLLDDNRRDLERLRRELERILREIEKRLKDVEKDV

SEQ ID NO: 16526 - protein, 59 aa, Artificial Sequence
  Synthetic
EDVVRELMKKVDDDHKESEKLVRESEEKLERDNERTRRIADKLRKELDDTREEIERDAK

SEQ ID NO: 16527 - protein, 56 aa, Artificial Sequence
  Synthetic
DSEERAEDVARENKEILERVDEKARKLLDDNRKVVEELKKTNEESSRELKRVLDEL

SEQ ID NO: 16528 - protein, 59 aa, Artificial Sequence
  Synthetic
EETVEELLKKMRAISRDSERKVKELLDKIRELSDRSRRRAEELNKEHKKIVDDIAERRR

SEQ ID NO: 16529 - protein, 57 aa, Artificial Sequence
  Synthetic
SVEERLRELVKENRDVVRRAEEEFRRLVEENKRILEEIDRRARESSRKLKDVLDKLN

SEQ ID NO: 16530 - protein, 59 aa, Artificial Sequence
  Synthetic
EETMERLLRKAKEISRRSKERLKRLLDKVKKLSEDSERELKKLLDEHEKIVEDIEREAR

SEQ ID NO: 16531 - protein, 56 aa, Artificial Sequence
  Synthetic
DDERRLREVSDRNRRILDRIKKEVERLLDEVRKILKEAEDRLRRSSERLEELLRKD

SEQ ID NO: 16532 - protein, 59 aa, Artificial Sequence
  Synthetic
EREVKKTLDEMRRRSRESEEELKKLLKEIKEIVEELKRKLDTLLKEHKEIVEEIKRRTT

SEQ ID NO: 16533 - protein, 56 aa, Artificial Sequence
  Synthetic
SDEERVRRLEEEVDKTLEKVERELRKVSEENKRTLDRLRAEMEKSSKELERVLEEL

SEQ ID NO: 16534 - protein, 59 aa, Artificial Sequence
  Synthetic
ERDVERTLRKIEETVKKLAEDLKRLLDEIKKISEESKRRAEELLRKHKKIVDDIDKRTR

SEQ ID NO: 16535 - protein, 60 aa, Artificial Sequence
  Synthetic
SMKEELDRLLKELRERNKEIEDRAEELLRRSTDSLRKVKEKLDKLLEESTRILRKVEKEN

SEQ ID NO: 16536 - protein, 55 aa, Artificial Sequence
  Synthetic
EKVLKDIKRVIDEDEERLKRVLDDYERRVRELEDKVKKILDRYKTEVDKLRERAR

SEQ ID NO: 16537 - protein, 60 aa, Artificial Sequence
  Synthetic
SVEEEIRDLLRKLREIVDRVRRRLKEILEESTRRLEEVTRRIDESNEDLKRAVDDVKRRN

SEQ ID NO: 16538 - protein, 55 aa, Artificial Sequence
  Synthetic
KEVLRKLEEEIEKLRKEAKKILDEYRKLVEDLADKIKKILDRNRKLIEELVREVK

SEQ ID NO: 16539 - protein, 60 aa, Artificial Sequence
  Synthetic
SESEKTLKDLDEISKRYEKKVREMLERHKRLSEETKKRDDEALERLTRLVKELKDVARRG

SEQ ID NO: 16540 - protein, 59 aa, Artificial Sequence
  Synthetic
EDVKRRLDELLERHKRISEEVEKRNEDLLREHEEISRRSKKRIDDLLREAERILDEMRR

SEQ ID NO: 16541 - protein, 60 aa, Artificial Sequence
  Synthetic
SESEKVLRDLEKISEDTARRLEDELRKHKEIVDRIKEEDDEMLDRLRKLVETLKRLAERG

SEQ ID NO: 16542 - protein, 59 aa, Artificial Sequence
  Synthetic
EEVKRRLEELLKRHKEESDRARERNERLLKEVRDLSEESRERIERLLRELEERVREDER

SEQ ID NO: 16543 - protein, 60 aa, Artificial Sequence
  Synthetic
SRSEKSLKELREISERTRKRLEDKLDRHEKESKKVEDKAREVLKELEDLVRTLEEVARRG

SEQ ID NO: 16544 - protein, 59 aa, Artificial Sequence
  Synthetic
EEVRRRLRELLERHKRISDEARKRNEDLLREHEKRSRDIEKRLDDLLKEAEDRLRERKR

SEQ ID NO: 16545 - protein, 59 aa, Artificial Sequence
  Synthetic
SDEEELRRLIEEHEKILKEIEDRVRESSKRNKEILKRLEDEVRKLLETVKDRLEKARER

SEQ ID NO: 16546 - protein, 59 aa, Artificial Sequence
  Synthetic
SETAKRVLDELKERSERSMEDLKRLLKEHKERVDEMRRRAEELLKRLREVIRKVEEEIR

SEQ ID NO: 16547 - protein, 56 aa, Artificial Sequence
  Synthetic
SRDEEVKRLKKEHEDILEEIRKRVDESSKRNEKILREIKERVKRSSDDLKRLLEEL

SEQ ID NO: 16548 - protein, 59 aa, Artificial Sequence
  Synthetic
EEDVERVLREFEEVSRRSEETLRRLLEKHKELVERAARELETLLKEHRERVRKIEEEAK

SEQ ID NO: 16549 - protein, 60 aa, Artificial Sequence
  Synthetic
SSKERLEKLLRELEEDLRRAHEEHKRLIKRLREILDEIRKRVEKLNRDLDRVLERAREEG

SEQ ID NO: 16550 - protein, 55 aa, Artificial Sequence
  Synthetic
EELLKEVKEMIKRLRKKIKKSLDDVRRVIRELEEHARRDLRKLEKDLKDIEDKLR

SEQ ID NO: 16551 - protein, 60 aa, Artificial Sequence
  Synthetic
DSEERLKELERRLRELLKRVSERSKKLNKEHEEINRKAEEEVERLNRELERDLEDAARKG

SEQ ID NO: 16552 - protein, 55 aa, Artificial Sequence
  Synthetic
DELLREAEKMLKELEELVREDEKRLKDISKEVEEHYRKDLEDVKRAIKEIRDRLK

SEQ ID NO: 16553 - protein, 60 aa, Artificial Sequence
  Synthetic
DSERRLEKLLRELKELLKRVEESLRRLNEEHKRINDEARERSKRLNEELEETLRKAREDG

SEQ ID NO: 16554 - protein, 55 aa, Artificial Sequence
  Synthetic
EELLKEIKDRLKELAEHVERDERRLKRISEEAEKRYREDVREVKEMIEEIERELR

SEQ ID NO: 16555 - protein, 60 aa, Artificial Sequence
  Synthetic
ESEERLRDLIRKIRELLEEIERRLRDLNRRLREILKRIEEESEKLNRELKKILDEARERG

SEQ ID NO: 16556 - protein, 55 aa, Artificial Sequence
  Synthetic
EELLKEVRERLRELEEHARRDLETLKRMIRKLEEEAKKDLRELEKMIKDIRDKLK

SEQ ID NO: 16557 - protein, 60 aa, Artificial Sequence
  Synthetic
SLEEALRKLEEELERLNEEAKRRIDRLIEELRRLNEEARKKIERLIEETRELLKRLAEEG

SEQ ID NO: 16558 - protein, 55 aa, Artificial Sequence
  Synthetic
REILERAKELLKKLEREYRELLKKIEKVVRDLEEKYRELLKRHRKETERLDREVR

SEQ ID NO: 16559 - protein, 60 aa, Artificial Sequence
  Synthetic
ELAERVKRLIEEHRKTDKEVEDRIRKLIEDHDRENRKVEDEIRKLIKELREIVDRARKEG

SEQ ID NO: 16560 - protein, 55 aa, Artificial Sequence
  Synthetic
EEILDKIREVHRRVRKKARDLAERIKDAHRKLRKKVEELLRRIKEMIRRLEEELR

SEQ ID NO: 16561 - protein, 60 aa, Artificial Sequence
  Synthetic
SDRERLTRLIEELRKLLEKWEREVKKINDEIRRTVEKVEEDSKKSIEDLRRLLKEMEDRG

SEQ ID NO: 16562 - protein, 56 aa, Artificial Sequence
  Synthetic
TKDLERRIEDVIRRLKKLADDDLRDLRRFLKELKERADKLRKEDEEALKELRDRAE

SEQ ID NO: 16563 - protein, 60 aa, Artificial Sequence
  Synthetic
SREDDIRRLIEEARKLVEDAERRSKKSIDDIRRLVKEWEEEVKRINDDLKRLIDEARKRG

SEQ ID NO: 16564 - protein, 56 aa, Artificial Sequence
  Synthetic
DKDLKERIKKLLDELRRLVEELEKRDKEMLDRIKKLADDDRRELERILKKLEDDLR

SEQ ID NO: 16565 - protein, 60 aa, Artificial Sequence
  Synthetic
SAEDTIRTLLERHDDLDREVEERSKESIRELRRLIKEWRERVRKLNEELKRLLDDLRRKG

SEQ ID NO: 16566 - protein, 56 aa, Artificial Sequence
  Synthetic
KEELIEEIKEMNKKAKKSVDELEKKDRDVLDEIRKMAKEDLDRLRKALEDLERDAR

SEQ ID NO: 16567 - protein, 60 aa, Artificial Sequence
  Synthetic
SSEDRVRDIERRHKEEDDRVEEESRRSTREIRELLRTAKERSDDSIRKLRKLIDDLRKEG

SEQ ID NO: 16568 - protein, 56 aa, Artificial Sequence
  Synthetic
TEELEKELEDVNRDVDRSAKRLKERDEEALKTLEDEIRKLEEKDKKVLEDLEREAR

SEQ ID NO: 16569 - protein, 57 aa, Artificial Sequence
  Synthetic
SDKEEVDKLKERNERVLEEVRRRLEKLEKDNKDTLKKIRDDSERLREKIKRVRDREQ

SEQ ID NO: 16570 - protein, 59 aa, Artificial Sequence
  Synthetic
REFVEKALREYEELLKRSRETLEELLRRYKKLLDESRKTAKEDLDRSEEIIKKLADESK

SEQ ID NO: 16571 - protein, 57 aa, Artificial Sequence
  Synthetic
SDEEEVKKLHDENKKVNDEMREESKKLHDENDRVNKEVKERAKKVSKELEDMLRREQ

SEQ ID NO: 16572 - protein, 59 aa, Artificial Sequence
  Synthetic
EETVRRLLEKVREEIRRSKKRADDDLKTTKELIEKSEREVDRLLEEIKKIIEELERRAR

SEQ ID NO: 16573 - protein, 56 aa, Artificial Sequence
  Synthetic
SELEKVLREVEENLREVKRENEEKLRRNEENIKRLEEEDRRRLEEIEKMIEEIERA

SEQ ID NO: 16574 - protein, 58 aa, Artificial Sequence
  Synthetic
EVEEELRRLREEYEEVSRRSKEELEKSLRRLEEVHKESRKRLRDLLKKLDDVAREERK

SEQ ID NO: 16575 - protein, 56 aa, Artificial Sequence
  Synthetic
DELRELLKDIKRTTEDVEREVEEILRKVEEMIRRLEEEDRKVLEDIRRKIEDIRRA

SEQ ID NO: 16576 - protein, 58 aa, Artificial Sequence
  Synthetic
EVRKEMERLRREHEDVDKKVRDELRKLEEELRRVHRESEKALRDLLRKLREVAEREKT

SEQ ID NO: 16577 - protein, 56 aa, Artificial Sequence
  Synthetic
DELEDFLRKVERVIKELRDDDKRALDRIREVTKDVERKAREILKRVEEVIRRIEES

SEQ ID NO: 16578 - protein, 58 aa, Artificial Sequence
  Synthetic
EAEEALERLKTRLEKVHRDSKRALEKLRRDHEEVDKRITEELRKLMERLKRVVDELRR

SEQ ID NO: 16579 - protein, 59 aa, Artificial Sequence
  Synthetic
SADEALRELEERNRKVNEDVKREDERLHREDREVNKRIREEDKKLHKTLRDVLEELRKK

SEQ ID NO: 16580 - protein, 59 aa, Artificial Sequence
  Synthetic
ERRVEKLLRRYKKVLDEVKRELKESLDKAERVTRKSEDDARRSLEEIKKEIEEVRERIR

SEQ ID NO: 16581 - protein, 59 aa, Artificial Sequence
  Synthetic
RVDEELRKLVEDNKRKNEEVKKELKKLKEENERVNKEVRERDRKLHEKLRRVLEEVRRT

SEQ ID NO: 16582 - protein, 59 aa, Artificial Sequence
  Synthetic
EEEMRRLLEEYEELVRRVLKRLKEILEEYERLVRRVEEEVKKSLEDIERKIKEAKDRVD

SEQ ID NO: 16583 - protein, 59 aa, Artificial Sequence
  Synthetic
DVEEEVKKLKDKNRRINEEVKKRMRELEERNKELNKRIREEDERLHRELRKVLEEARKT

SEQ ID NO: 16584 - protein, 59 aa, Artificial Sequence
  Synthetic
REEVEKLLREYEERLERVRKRVEEILAKYKELLDRVEERARKSLKEIKETIEDARRRIK

SEQ ID NO: 16585 - protein, 59 aa, Artificial Sequence
  Synthetic
SMDEELDKLTRENEAVNERVEREARRLKEENRKVDEEVRRAVEELKERVRRVLEEVRRK

SEQ ID NO: 16586 - protein, 59 aa, Artificial Sequence
  Synthetic
EEDVRRLLEEYARLVREAEREVREILRKYEELVRKARKDAKKLLDDIERKIEKIKRDVD

SEQ ID NO: 16587 - protein, 59 aa, Artificial Sequence
  Synthetic
SMDEELKKLVKENEDLNRRVREEAERLRKENEKVDEDAEREDKRLHDKAERVLRELRRR

SEQ ID NO: 16588 - protein, 59 aa, Artificial Sequence
  Synthetic
ERTVTELLKEYRELVRRVEERVKKILKEYKEEVEEVKRRLEESLKDIERKIDEIRRRAT

SEQ ID NO: 16589 - protein, 59 aa, Artificial Sequence
  Synthetic
SMDEALEELTRRNEEVNKRIEEEDRKLHKRNKEVDDEVRKRDKDLHDELRRVLEDARRT

SEQ ID NO: 16590 - protein, 59 aa, Artificial Sequence
  Synthetic
EDEVEKLLREYKRRVEEVKKRAEDSLKRYEEEVKELEDEVRESLERIRRDIEDVKRRID

SEQ ID NO: 16591 - protein, 59 aa, Artificial Sequence
  Synthetic
SMDEAVEKLKKENKDIDEEVRRRLDELRKRNEEVNKKIKEDDDRLHKEAKEVLEDVRKT

SEQ ID NO: 16592 - protein, 59 aa, Artificial Sequence
  Synthetic
EDIVRKLLREYEKLLREVRERARRILEEYKRLVKEVRERAERSLEELKREIKKVRDRAK

SEQ ID NO: 16593 - protein, 60 aa, Artificial Sequence
  Synthetic
SEKEELLRKAKEVIDRIRKELEELLRRAREVNKDSRRTVEEVLRKAREVSERVRKASERG

SEQ ID NO: 16594 - protein, 55 aa, Artificial Sequence
  Synthetic
EELDDLRRRAEELLKRAEDEIRKLHEENKRSNEEAERAIRELAKRNKELDDKTRE

SEQ ID NO: 16595 - protein, 60 aa, Artificial Sequence
  Synthetic
KEKEDLIEKMKKVLEDIRKRLEELLKRARKVNEDSRKLVKEVLDKIKKVNEDVRKVATES

SEQ ID NO: 16596 - protein, 55 aa, Artificial Sequence
  Synthetic
EELTRLAREIEKLLEEARRRVEKLHEENKRSNEEAKERMERLRDHNRKLDDDTRK

SEQ ID NO: 16597 - protein, 60 aa, Artificial Sequence
  Synthetic
REREELIKKVRTVHKRSEEELRRHSEEVKKVNRDSRERVKEHLKRVKEVIKELEDVARES

SEQ ID NO: 16598 - protein, 55 aa, Artificial Sequence
  Synthetic
RELKELADRNKKLLEDIEREHKKLHEDNRRSNEDARRRHEELKREVEKLLDELRK

SEQ ID NO: 16599 - protein, 60 aa, Artificial Sequence
  Synthetic
SLEEEIKRLVKHHEELLREVRKRLKELEDHHRELDERHRRMLEELVREARKLIKDVKDDI

SEQ ID NO: 16600 - protein, 59 aa, Artificial Sequence
  Synthetic
EETVERILRTLKTTDERTTDTVREILRKIKRTNEESKETADRTVKRAKDLIREIRERVR

SEQ ID NO: 16601 - protein, 60 aa, Artificial Sequence
  Synthetic
SAREAIKEIKKHHKKLLEDVKETIDRIEEHHRKLDKDHRDELKKLLEEVRELLRDIRSRI

SEQ ID NO: 16602 - protein, 59 aa, Artificial Sequence
  Synthetic
ERTVEKILEELKDMNRATKRRVEEILRRLKKTNDESEKRARDTLTRIKELIEEVERRAR

SEQ ID NO: 16603 - protein, 58 aa, Artificial Sequence
  Synthetic
DESEELKKEAKEILDRLEKVLRELTDRNREMLKRIEKLIRENEKRLEDILREIAKRAS

SEQ ID NO: 16604 - protein, 59 aa, Artificial Sequence
  Synthetic
EEVEKELKRIKDELKRLVEKAERSLRESEERLRRLLEEAEKRNRKVEREIEKLLDDTRK

SEQ ID NO: 16605 - protein, 56 aa, Artificial Sequence
  Synthetic
SKEEKITRDAEEVLRRSEEIIRRLLRRLEEVLKDLERSARENKKRLDKILEDLAKL

SEQ ID NO: 16606 - protein, 56 aa, Artificial Sequence
  Synthetic
EKRVKRMEEELRRLHEEVRRRVEKVKRDMDRLNKKIKEDSRRVNEEIRKLLEDKTR

SEQ ID NO: 16607 - protein, 56 aa, Artificial Sequence
  Synthetic
SEEEKVRKELEEVLRRSDEDIERNRRRLEKVLDDLRRSAEENKRRLKEILDRLKDT

SEQ ID NO: 16608 - protein, 56 aa, Artificial Sequence
  Synthetic
EKEVRKVKDRLDKLHEKVKRISEEVNERIRRLNKRIKEISKRLNEELEELLRRRRT

SEQ ID NO: 16609 - protein, 56 aa, Artificial Sequence
  Synthetic
DELEKFKEDVKEVIKKLAETIKRLLDDVRRVLEKLRKLAEENKERLDRILDELRRL

SEQ ID NO: 16610 - protein, 56 aa, Artificial Sequence
  Synthetic
EKEVARLREEIKKLNERLKREVERLKRELEKLLRDIEKTSEDANRRLKELLDRTRK

SEQ ID NO: 16611 - protein, 56 aa, Artificial Sequence
  Synthetic
RREEELLERAEEVLEKLERIIEETERELKEVLDRLRKSIEDNLRRLKKVLKELKDN

SEQ ID NO: 16612 - protein, 56 aa, Artificial Sequence
  Synthetic
EKDLTEVKKRLRDLLKKMEDVLREVKKRLDDLNREMDDRSRKANEELRDLVRRKEK

SEQ ID NO: 16613 - protein, 61 aa, Artificial Sequence
  Synthetic
DVERKLREVEERHKDVLKKAKELLDKVEEDHKKSSKEVEDVLEEMRRRAEKLVRDAVRKKG

SEQ ID NO: 16614 - protein, 59 aa, Artificial Sequence
  Synthetic
DELARRIEEELEKLLRTLEELVTEIIKELEKLLKTHEDLLREVEKTLRRIIEELEKRDK

SEQ ID NO: 16615 - protein, 61 aa, Artificial Sequence
  Synthetic
SVEETLRTVEEEHRKSSKEAEELLEEVERRHEESSKRLEDTLREAEKEVRRLAEDVVRRRG

SEQ ID NO: 16616 - protein, 59 aa, Artificial Sequence
  Synthetic
KELVDEARRELKELLETHKETVKRVLDKLRDLLRTHEEKMKDVEETLRRLLERLKEETR

SEQ ID NO: 16617 - protein, 61 aa, Artificial Sequence
  Synthetic
KVEDSLREVKKRHKDKVDEVRKRLREAEEENKRLLDEVRRELERVEERIRRIVEEIVRKKG

SEQ ID NO: 16618 - protein, 59 aa, Artificial Sequence
  Synthetic
DEEARDIERRLRDLERTLEELVKEADERLKRSNEEDEERIRRVRKKLEELLRELEKRDE

SEQ ID NO: 16619 - protein, 58 aa, Artificial Sequence
  Synthetic
DEDRDLKRELDRLLREHEELVDRSTKRLEKLLRKHEREARESKKELEKLNDELREIAR

SEQ ID NO: 16620 - protein, 59 aa, Artificial Sequence
  Synthetic
EDVKRKLEEVRRRIEESVKRHRETVEEMRRRVDESVRRHERTVDELRRTHEELIERVRR

SEQ ID NO: 16621 - protein, 59 aa, Artificial Sequence
  Synthetic
KDEEKIIEDLKRLLRKHEKLVEESRERLKRLLETIRKIAKDIVERLKRLNEELREIAKR

SEQ ID NO: 16622 - protein, 59 aa, Artificial Sequence
  Synthetic
EEAREKIKRVVEELKESVERHERDVDRVRREAERLLEEVTRRIETVRRTHERLIEEIKK

SEQ ID NO: 16623 - protein, 59 aa, Artificial Sequence
  Synthetic
SEKDEIKRELEELLREHEKLAEESRRRAEELLRDIERRARESLTELRELNKKLREEARR

SEQ ID NO: 16624 - protein, 59 aa, Artificial Sequence
  Synthetic
EDVEREIRKVREDLKRSVDEHRKDLERIRRELEELLEKHHEDLRDVERTHRELLKEIKR

SEQ ID NO: 16625 - protein, 56 aa, Artificial Sequence
  Synthetic
DVEDELRRLHEENKDLLREAEEELERLHRENKKLLEDARRLLERLEEELERIERRL

SEQ ID NO: 16626 - protein, 59 aa, Artificial Sequence
  Synthetic
REEVEREVRKIEKLIRDSRERVRELIEKIERTLRDSERRVRELVKEVEKRLREIERKVE

SEQ ID NO: 16627 - protein, 56 aa, Artificial Sequence
  Synthetic
DVEKELKELHDKNEEILERARRLLERLHKENEEINKRVEEALRRLAEELRRLKEEL

SEQ ID NO: 16628 - protein, 59 aa, Artificial Sequence
  Synthetic
RREVKELIRKIDELLRRSKEEVDRLVKEVERLLRESKRRVEEVIEKLRKIIEELEREVR

SEQ ID NO: 16629 - protein, 56 aa, Artificial Sequence
  Synthetic
REVEEVIKDARRLLEELRKHSEDEVRKVEEEIKRLRDDNKRAVDDIERLLRELEEA

SEQ ID NO: 16630 - protein, 59 aa, Artificial Sequence
  Synthetic
RRAETKLEELRRRLDEILRTTEELLRRLKRELEKLSEESKARLDELKRKLDEILKETRR

SEQ ID NO: 16631 - protein, 57 aa, Artificial Sequence
  Synthetic
DEAREIVRELEKRIKDIEDRARKLIRELEKSLEDLKRRVEEMLREWEEESKELERRN

SEQ ID NO: 16632 - protein, 56 aa, Artificial Sequence
  Synthetic
REKVKEIKKRLDELLKRIEDELRRIREEDKRIHDEVEKELRKLERRDEELLKRLED

SEQ ID NO: 16633 - protein, 57 aa, Artificial Sequence
  Synthetic
SEAEDIVRKIEELLKRHHDRVEEMLRRWEELTRRHSEKAEKIVREVEKLIDELREAK

SEQ ID NO: 16634 - protein, 56 aa, Artificial Sequence
  Synthetic
EEEVKRLEKEIRDNLREMEERLKELEKRDKDNLDRIRELHRRLREELEKLLEDARR

SEQ ID NO: 16635 - protein, 59 aa, Artificial Sequence
  Synthetic
SMDELLKRLEEEDRKLNEESKETLERLRKHDEDLNRKNREKLKELKDRVDRVLEDAKKR

SEQ ID NO: 16636 - protein, 59 aa, Artificial Sequence
  Synthetic
EDDVRREVEDVKRRIEDSREKLRKLTEKWKKLNRESDEKVKKHVEDVEREIEKVRKEAE

SEQ ID NO: 16637 - protein, 59 aa, Artificial Sequence
  Synthetic
SSEEELKKLSDKARRLNDENRKILERLKEHDERLNKRNKEELKRLREDVERLLEDARRR

SEQ ID NO: 16638 - protein, 59 aa, Artificial Sequence
  Synthetic
EEDVKRKLDTIDKVIRDVRRRIEEHVRRWEELNRRSKKEIEDHVKTVEDVIKEAKDRID

SEQ ID NO: 16639 - protein, 61 aa, Artificial Sequence
  Synthetic
DEDEEVDREVREMIKRLEEHVKRDEDTLEEMLKRLRDHVERDRRRLEELLKDLERLVRERG

SEQ ID NO: 16640 - protein, 55 aa, Artificial Sequence
  Synthetic
EELKRLDREAEELLRRVDRLNEEVEKKLRKLLEEVRRENKRLEEEAKRLLDKAEE

SEQ ID NO: 16641 - protein, 61 aa, Artificial Sequence
  Synthetic
DEDEEVRKKVEEEIKRLKKEVEEDRRDVERLDEESKDKVRRDEKKVKDLLKELEDLVRRDG

SEQ ID NO: 16642 - protein, 55 aa, Artificial Sequence
  Synthetic
EELKRLEEEAKDLLRDVERLNRELHKRNREILEEATRRNEELKRELKELLDRARK

SEQ ID NO: 16643 - protein, 61 aa, Artificial Sequence
  Synthetic
SEEERVKEELDKAIKTLEKLVKDDLKKVADALRRLREHVEKDLRDLEEVLRELKELVDKTG

SEQ ID NO: 16644 - protein, 55 aa, Artificial Sequence
  Synthetic
EELKRAERELDRLLTEADRRNDELRREAERLLEKVNEDNRTVKERARRLLDDARR

SEQ ID NO: 16645 - protein, 61 aa, Artificial Sequence
  Synthetic
REDEEIVKEMERLLERLEELSRRIMEEVKRIDKESEDHIKRDEDKLREELERLRDLVRREG

SEQ ID NO: 16646 - protein, 55 aa, Artificial Sequence
  Synthetic
EELKELEERAKRLLERHERTNEELHRRNEEILRKANELNEEVRRRLDKLLDEVRT

SEQ ID NO: 16647 - protein, 61 aa, Artificial Sequence
  Synthetic
DREREVRRRVKEALDEIKRHVDRDRKKAEDMDRRSRELSDELRRRVDDLIKRLKELVDRDG

SEQ ID NO: 16648 - protein, 55 aa, Artificial Sequence
  Synthetic
EELDELRKELDKLLTEVDETNKKLHEDNKRILDDHDRINEELRRRMEALLREATR

SEQ ID NO: 16649 - protein, 61 aa, Artificial Sequence
  Synthetic
SEEEDMVRRVREMIKRLRDHVRRDKDKLDKEDKRSADHVDRDRKRLEDLLKELRDLVRDTG

SEQ ID NO: 16650 - protein, 55 aa, Artificial Sequence
  Synthetic
EDLKRLEKELRDLLDEVNKENEKVHRRNREILKRADELNEEAERRLRELLREAEK

SEQ ID NO: 16651 - protein, 61 aa, Artificial Sequence
  Synthetic
KEDEEVKDKVEKLIRKLEKESRDISEEVKRLDEESKKLARDLTEEVDRVIKRLRELVERDG

SEQ ID NO: 16652 - protein, 55 aa, Artificial Sequence
  Synthetic
EELKKLEKKLEELLERHRRDNKRLHEENRRILEELRRRIKELKERLRRLKEEARK

SEQ ID NO: 16653 - protein, 60 aa, Artificial Sequence
  Synthetic
ETDERLDELRRRLEKSLKDHKKLLDEVRKKAEELLDRNARLLEELKRELDELLKKVEEDN

SEQ ID NO: 16654 - protein, 59 aa, Artificial Sequence
  Synthetic
REVVEELLRRAEEEIRRHRKKVKESLDRLEDEIRKVEEDSRRSEKKVRKLIEDVKRRVK

SEQ ID NO: 16655 - protein, 59 aa, Artificial Sequence
  Synthetic
STEETLEKLDRDLKDSSRRNEELLKRVDDRLRESSKENRKILKELSDRLRDLLEKVKKD

SEQ ID NO: 16656 - protein, 59 aa, Artificial Sequence
  Synthetic
DKVVRELVKRAEDEIRDHKRLSKESLDRLDEEIKRHRELSKESMEEADRLIKTVKERVR

SEQ ID NO: 16657 - protein, 59 aa, Artificial Sequence
  Synthetic
ELDDLLREVEKRVRDLNRRNEEELRRVEDRMRESLRKSEEDLRRVEERLKKTLTRVKTE

SEQ ID NO: 16658 - protein, 59 aa, Artificial Sequence
  Synthetic
RRSAKKILDDLERTLEDVERRSRESVRRLREEIETHRKLVEELKKRLDDLEEEVKERVR

SEQ ID NO: 16659 - protein, 56 aa, Artificial Sequence
  Synthetic
SSDEILKRVKEELDRLLEENKRLLEEARKRLEDLIRKNREDLKRVEEKMRRLLEET

SEQ ID NO: 16660 - protein, 59 aa, Artificial Sequence
  Synthetic
EEVVRRLAEELRRLIEEVKRKIEESERRLKETLDRYRKLVEDSLRKLEETIRRVREESR

SEQ ID NO: 16661 - protein, 56 aa, Artificial Sequence
  Synthetic
SSEELLRKVKEDAKKIIKENEELLRKVDKDMRDIIKENRDLLEELTERVKRLLDRT

SEQ ID NO: 16662 - protein, 59 aa, Artificial Sequence
  Synthetic
EEVVKRILEELKKLLDEAERLSRESLKELEKMLREYRESVERSLRKVDDTLRRVEEKSR

SEQ ID NO: 16663 - protein, 59 aa, Artificial Sequence
  Synthetic
DDKRLLEEIRRRADELIKENEELLRRLEKLNEDLERRNKELNERLAERVKRLEEDVRRR

SEQ ID NO: 16664 - protein, 59 aa, Artificial Sequence
  Synthetic
RRIVEEEVDRVRKTIEELKRKSEDLVREHEEIVRDLERKSRELVKKVEKLLRDVRERAR

SEQ ID NO: 16665 - protein, 60 aa, Artificial Sequence
  Synthetic
SVDEMLKEIRDRAKKVDEDNRRLVERLEERNRELDERNKRLLDDIRRKVEEVMRIADERV

SEQ ID NO: 16666 - protein, 55 aa, Artificial Sequence
  Synthetic
KELVDRVRKLLEEVRRKSEKLVREHEDLVRRNEEHSRRLVEEADRILERAKRELD

SEQ ID NO: 16667 - protein, 60 aa, Artificial Sequence
  Synthetic
SVEEMLRRLRERDEEINDRLRRLAEDLKRENKRLDDENKKLVDEIREDVERLKEKLDRKL

SEQ ID NO: 16668 - protein, 55 aa, Artificial Sequence
  Synthetic
SELLKRWEELLRRLEKRIRDLVEDHKRLVEENERHSRKLVEEVKKALTDAEKKVE

SEQ ID NO: 16669 - protein, 60 aa, Artificial Sequence
  Synthetic
SVEELLEDIRRRVEKVKEDNKRMLEDLERKNRELKKEADDLAREIKKRVRDLEKELDEKL

SEQ ID NO: 16670 - protein, 55 aa, Artificial Sequence
  Synthetic
SKLVEEVRKLLEEARRESEELLRRHKKLVDDNRRHIRKLFEDVKKILDDARKEVE

SEQ ID NO: 16671 - protein, 61 aa, Artificial Sequence
  Synthetic
SEEEEIVKDVERVIRELEERHKDLVRRAREDIKRLREHIRRSIRALDEDIKRIEEKIRRDG

SEQ ID NO: 16672 - protein, 56 aa, Artificial Sequence
  Synthetic
EDLVRDLERKNKRVIDESRRLLEELRRRYEELLREYRELLEDLRRKYKRIEDEAKR

SEQ ID NO: 16673 - protein, 61 aa, Artificial Sequence
  Synthetic
SEKEEIVKTVKTVIDRLEEEHRKILEDLRDDIRRADEYIKRSIDEVEEDLRRIEETVRRDG

SEQ ID NO: 16674 - protein, 56 aa, Artificial Sequence
  Synthetic
ERLVRELEKENEKLKRRSERMLEELEKEYRRLLKKYEDLLRELERKYEEIKDKLRK

SEQ ID NO: 16675 - protein, 61 aa, Artificial Sequence
  Synthetic
SEDEDIVRKAKEDIERLKREVEETIKRVEDDARKVEKEVRDIVERTRKEIKKLEDEVRERG

SEQ ID NO: 16676 - protein, 56 aa, Artificial Sequence
  Synthetic
EKLVEELRRELEKLKKEIDDLLRDLEKKYDDIRKKIRKLSEELKKLLEELKRKLDE

SEQ ID NO: 16677 - protein, 61 aa, Artificial Sequence
  Synthetic
SELEKIVEEVRRDIKRVRERVEEIIRKTDEMIRRLEEHIKRSIERVRKDAEDIERTVRRDG

SEQ ID NO: 16678 - protein, 56 aa, Artificial Sequence
  Synthetic
KDLLDELRRRYEELEERIRRLSRELEEKLKKLRKRYEDLLEELEREYRRIAEEARR

SEQ ID NO: 16679 - protein, 61 aa, Artificial Sequence
  Synthetic
SEEEKIVEEVKRDIKKVDDEVKDIIRRTDKAIKDLRREHKELIDRTRKAIEELEDEVRKRG

SEQ ID NO: 16680 - protein, 56 aa, Artificial Sequence
  Synthetic
EDLVDELRKLYDTIREKIKRLSDRLREKNEKLKKESDDLSRRLRKELEKLEREVRR

SEQ ID NO: 16681 - protein, 59 aa, Artificial Sequence
  Synthetic
SKEELLKEIRDELRKLKKKHDDLLEEIKREYDRLREKVRKDLEDIERKLRKLEEDVERK

SEQ ID NO: 16682 - protein, 59 aa, Artificial Sequence
  Synthetic
EEEVKRVVERVKELIKRLEDNIREAIRKLREDIKRLEEEVEKARKDVEDFLRELRKKVK

SEQ ID NO: 16683 - protein, 59 aa, Artificial Sequence
  Synthetic
SSDELAEELKREYDRNKEEHKKLLEELKKEYKRLLDEHRDLLRRIKERLDRLLRRIEEK

SEQ ID NO: 16684 - protein, 59 aa, Artificial Sequence
  Synthetic
EELVERVIRDVRKHIEDNTENIRRDIERVRKDIETLEENVKDAAKKVEDILKTLEDEVK

SEQ ID NO: 16685 - protein, 59 aa, Artificial Sequence
  Synthetic
DKERLAEELRRLYERNKREHEKLLKKIEDDLRKLEEDHERLLREIEEAAERLRREIERK

SEQ ID NO: 16686 - protein, 59 aa, Artificial Sequence
  Synthetic
EELVKRVVDRVRRHIEENTKNIEEAIKRVEDVIRELRKNIEEAIKRVREVLKRLKDEIK

SEQ ID NO: 16687 - protein, 59 aa, Artificial Sequence
  Synthetic
SEDELLDRLREKYERNKERHKRLLDELRKRYEDLKREHEKLLRDIEEELKKLEDKIRRK

SEQ ID NO: 16688 - protein, 59 aa, Artificial Sequence
  Synthetic
EDLVRKAIEDVDRHIKENTKNIEDTIRKVKKNIEDLKRNVEEAIKKVKEVLREIEERTR

SEQ ID NO: 16689 - protein, 59 aa, Artificial Sequence
  Synthetic
SKEELLKRLKERNERLNEDSERLAREIKRRLEELRKEHRRLLKEIEERLKELEEDIRRK

SEQ ID NO: 16690 - protein, 59 aa, Artificial Sequence
  Synthetic
EEDVKRVIRRWEELLKELEKDNRRVVKEAKELIDRLERNIRERIKEVRDALREIRKKVK

SEQ ID NO: 16691 - protein, 59 aa, Artificial Sequence
  Synthetic
STDEKLKELEKRNRDLNEESRKLAEEIRKRYEDLKKEHEDLLREIEKRLRDLMREVERK

SEQ ID NO: 16692 - protein, 59 aa, Artificial Sequence
  Synthetic
EKSVDDVIRRWEELLEELRRRNEEAVRRMERNIDELRRNVRETIDRVRKLLEEIKRKVD

SEQ ID NO: 16693 - protein, 60 aa, Artificial Sequence
  Synthetic
SEAERVVEELERLLKKNRDDNERVIRRLEELLDRLREKNERAIEELRKLLDELKKVVDRG

SEQ ID NO: 16694 - protein, 56 aa, Artificial Sequence
  Synthetic
RELLREIEERLKTLSEESKRLIDRIREELKRLTKESEDLLKDIERLLREVKERART

SEQ ID NO: 16695 - protein, 60 aa, Artificial Sequence
  Synthetic
DEMEDLRRDVERIHEESRKLSEDSVRTAEKIHRESEKLIDDLRRKVEKILKEVEDVVRRG

SEQ ID NO: 16696 - protein, 56 aa, Artificial Sequence
  Synthetic
EEELKKLEDRSRKLLEENKRLNEDLDRRSEELKARLKDILRRIDERLRDLEREADR

SEQ ID NO: 16697 - protein, 60 aa, Artificial Sequence
  Synthetic
DEVEELKRRAEEILRKYDEDSKRIVEEAERIVRTSAEKIERLRKKAEDILREASKVVDDG

SEQ ID NO: 16698 - protein, 56 aa, Artificial Sequence
  Synthetic
ERDLEKIETDVERLERKSKKLLEDLREKSERLKKRLEDILKRIKEEVERLKRKVEK

SEQ ID NO: 16699 - protein, 59 aa, Artificial Sequence
  Synthetic
DEMEELKKEVEEILKEYEKRSRDLFKELKEILRRSKELSEDSKREADKILRDAEKVVAD

SEQ ID NO: 16700 - protein, 56 aa, Artificial Sequence
  Synthetic
EDDLRRIEEKVKKLEKESRELLKRIKDESEELKRDNKRLNDEVREELEKLKERVRK

SEQ ID NO: 16701 - protein, 60 aa, Artificial Sequence
  Synthetic
DEMDELRREVKEILKTTEELIKRLEDKVRDILRRYKEVSDDIVRKAEDILRKAEDILRRG

SEQ ID NO: 16702 - protein, 56 aa, Artificial Sequence
  Synthetic
ERELEEIKKESEDLERRLKKVLERIEREVRRLEEETKELLKRIAEEVERLIREAEK

SEQ ID NO: 16703 - protein, 60 aa, Artificial Sequence
  Synthetic
KEAEDLVREVERILEDYDRVVKELKDDADRILEESRRLIEELKKKAEDILRRVRKVVEDG

SEQ ID NO: 16704 - protein, 56 aa, Artificial Sequence
  Synthetic
EELLERIKDRLRKLHEKSKKLLTDIKRESRRLEKRLEDILKRIKEEADKLKEEADR

SEQ ID NO: 16705 - protein, 59 aa, Artificial Sequence
  Synthetic
REEELERRVREESEELNRRLAEVHKRLRKKSKELNDRHKELDDRIRREADRLRKDIRRQ

SEQ ID NO: 16706 - protein, 55 aa, Artificial Sequence
  Synthetic
DEVLKELKEMHDRLREHVKRDSERAERMHEELKRLSDELERRVREALKRLKEKVR

SEQ ID NO: 16707 - protein, 59 aa, Artificial Sequence
  Synthetic
KKEEVRKRIEEELRRLKKDHRRLDEEIKRKLKKLDEEIKEVHERLKKAARDLEDEARRN

SEQ ID NO: 16708 - protein, 55 aa, Artificial Sequence
  Synthetic
KEVEKDVEDLLKELEDDSRRLEEEVERLIERVKRHVERDERRVREMLREIKEKIK

SEQ ID NO: 16709 - protein, 59 aa, Artificial Sequence
  Synthetic
SKEDLDRELRRLSEELNREHKELDERIRRELEKLRTRIDKVHEDIRREMKRLEDEVRKR

SEQ ID NO: 16710 - protein, 55 aa, Artificial Sequence
  Synthetic
EEVFEDAERLHRELKKKSRDLEERVKKLLEEIEDHVRRDETRVRKVLRDIEEDIR

SEQ ID NO: 16711 - protein, 59 aa, Artificial Sequence
  Synthetic
SKEDMLREAEERSRRLNEDHKRLDDELRKESEKLNRRHRDLDEKIDRELRRLKKDIRRR

SEQ ID NO: 16712 - protein, 55 aa, Artificial Sequence
  Synthetic
RELLERLRKVHEDLKKKSEDLKRTAEKLHRELEKESRDLVRDVERALDELRRKVE

SEQ ID NO: 16713 - protein, 60 aa, Artificial Sequence
  Synthetic
SSEELLRDIERRLEEMNRDTERVVEEIRRRLEELRKRHKETIDKIREELKKVEDLVRRRG

SEQ ID NO: 16714 - protein, 55 aa, Artificial Sequence
  Synthetic
EDVLRRAKRLIEKYKEDTKRIKEKLEKVIEDLRKNIEDFEEDVRRVLEELKKRIK

SEQ ID NO: 16715 - protein, 60 aa, Artificial Sequence
  Synthetic
SSRELLERIKEELKELEDRHRDLLRRIEEKLERLNRRTREVLERIKRKLDELKKRVEEAG

SEQ ID NO: 16716 - protein, 55 aa, Artificial Sequence
  Synthetic
EDLLREVKELIERLRENIKRAKDKVEELIKKYKRDTDEAKKEVDEEIKRLKEEVD

SEQ ID NO: 16717 - protein, 60 aa, Artificial Sequence
  Synthetic
DSERLVREIRERLKKLEKEHRELLEEIKDRLRRLNEESKKLLDDIKRRLEELRDRIRRAG

SEQ ID NO: 16718 - protein, 55 aa, Artificial Sequence
  Synthetic
EDVLRDLEKLIEDLKRNIERARAKVEKLIKEYEDKLEKIVRDAEELIKDLDRKVK

SEQ ID NO: 16719 - protein, 59 aa, Artificial Sequence
  Synthetic
SSEEILRKIEEELERLEREVRKIHRDNERKSEELNRRSKKILDDIRRELDRLKKEAEEK

SEQ ID NO: 16720 - protein, 55 aa, Artificial Sequence
  Synthetic
KEVVKEMRRALEEIKKEIEKVRKELEKRNREYRKRSEEVREEAERKLEEIKRRTD

SEQ ID NO: 16721 - protein, 59 aa, Artificial Sequence
  Synthetic
RSEEILREIRDRLRKLNEESEKVHEENERRSRELNERSREILKRIDEELKRLKKEVDDK

SEQ ID NO: 16722 - protein, 53 aa, Artificial Sequence
  Synthetic
VVRDLKKKLERYKRETDRVRKELRDLNKKYEDRSREIKRELERLLRDIKRRID

SEQ ID NO: 16723 - protein, 59 aa, Artificial Sequence
  Synthetic
SLEEVIKTVRKLLEEVERRLREVVERAERMLEEVRRRTREVSEEAREMLKDVEKALRDK

SEQ ID NO: 16724 - protein, 59 aa, Artificial Sequence
  Synthetic
DRIVEKLLRDAERIVKRLRELIEKLREEVEKIVDENRKTVEELRRRNEEIVRRLRREIE

SEQ ID NO: 16725 - protein, 60 aa, Artificial Sequence
  Synthetic
DVKEVLDDAERKLREVLKLIEDSLKKLKELSDEVIERIARSLEKLEKLIRDVDEELKRKV

SEQ ID NO: 16726 - protein, 59 aa, Artificial Sequence
  Synthetic
KEVVKEIKERVDKVVDEARKLVEESERSIRELVERSKKVVEESERSIEELRRELKETVK

SEQ ID NO: 16727 - protein, 60 aa, Artificial Sequence
  Synthetic
DLEEVRERARRLLRKLEEDLERVHKEMEELLRELEERIKASLERLDELLKRLADKLRRDV

SEQ ID NO: 16728 - protein, 59 aa, Artificial Sequence
  Synthetic
KEVVKEIEDRVRKVAEKVREVIERNRKLVRDVLDKIRRMLKESERSVEEVLKRLDDELK

SEQ ID NO: 16729 - protein, 60 aa, Artificial Sequence
  Synthetic
SLDEVVKRLEDLLREVEEKSKESSKRMEDLNREVNERLRRSSERLKRLNDEVKKRLEDAG

SEQ ID NO: 16730 - protein, 56 aa, Artificial Sequence
  Synthetic
VEEIKKLADKVVTELEKLVEDDRRLAEESFERARKIVEEDERLARESVDRARRLVD

SEQ ID NO: 16731 - protein, 59 aa, Artificial Sequence
  Synthetic
KLDEVIEEIRKLLRRMEEELRRSVEEIDKLLREVRELLRESSEKVKELLRRVTEELKKR

SEQ ID NO: 16732 - protein, 58 aa, Artificial Sequence
  Synthetic
KLVEDLKRRAEEVIRELREIVKRNTEIAREVVERAKRIVEKNEKLLKDVVEEAKKIVK

SEQ ID NO: 16733 - protein, 56 aa, Artificial Sequence
  Synthetic
SELEKAKEDVDRLLEDVNRVSEEVEDRVRKLLADSDRVLEEVERRVREVLKRLKDA

SEQ ID NO: 16734 - protein, 56 aa, Artificial Sequence
  Synthetic
VKTVADELRKVVKELLEINRRSLEELTKLVDESRRVNEKVMEELKKLVDDLRRRIE

SEQ ID NO: 16735 - protein, 58 aa, Artificial Sequence
  Synthetic
SEIEKVKEVVREVIERSRKLLKEVRDTVEKVIDESRKLSDTVRRRVEDAIRDVLERRG

SEQ ID NO: 16736 - protein, 59 aa, Artificial Sequence
  Synthetic
REEVKKVIEDLTREAKRSLERNREVVKELKKLADDLKDLNKKSVDRLDDLVRRLKERTE

SEQ ID NO: 16737 - protein, 60 aa, Artificial Sequence
  Synthetic
KRAEDVLEKLREDAKRVLKRNRDSVKEAEDLVRKSLRTSEEVVKTLRTELKKLLDELDRV

SEQ ID NO: 16738 - protein, 59 aa, Artificial Sequence
  Synthetic
EKVLRDIEREVRKIIKELEDMDDELRRILEEVIERSRRVNERLKELLKEADDRLREKLR

SEQ ID NO: 16739 - protein, 59 aa, Artificial Sequence
  Synthetic
DAAEELLRLVEDVARELKRLVDELLKENRETVERLKKVVKRSEEINREVVRTLRELVAN

SEQ ID NO: 16740 - protein, 58 aa, Artificial Sequence
  Synthetic
EKIKEVRRSIEEARRRVEEALREVNEASKEAERTVREALKRSREAVEKAVRDVTEAAR

SEQ ID NO: 16741 - protein, 56 aa, Artificial Sequence
  Synthetic
KELEDVLRESEKTAEELLRRVKKSIDRTRDVVRRLLEEIRKSIEETKRVADEAKRE

SEQ ID NO: 16742 - protein, 58 aa, Artificial Sequence
  Synthetic
DLVRRLERISEEVRRRVEKLVREDRKILEDVARALRELVKEDEEILRRVVKDLRDKTR

SEQ ID NO: 16743 - protein, 59 aa, Artificial Sequence
  Synthetic
DEDKKVVRKVERIIKRVKELHDKSVRDSEEVVREVLKRHKESVEKIKEIVRRIVEIAAR

SEQ ID NO: 16744 - protein, 55 aa, Artificial Sequence
  Synthetic
EELKEVIRRVEKLSEDVKRENEKSNDEVRKLSEDAIRENEEVLRRARKLVDDLRR

SEQ ID NO: 16745 - protein, 59 aa, Artificial Sequence
  Synthetic
DEEKEVVKKLRDIIREVERLHTESVRKVEEIVRRVLRLHKETVRELKEIVKRIVDIARN

SEQ ID NO: 16746 - protein, 55 aa, Artificial Sequence
  Synthetic
RELEKVAKEVEDRSKELLDRNEEVLDRVRKLSEDVLRENREVIERVREEVKKESK

SEQ ID NO: 16747 - protein, 59 aa, Artificial Sequence
  Synthetic
SEADKVVAELEKIVKDVVDAHKDSVRKLREIVRRAVERLRKDVDDTRRVVKEIVDIARS

SEQ ID NO: 16748 - protein, 59 aa, Artificial Sequence
  Synthetic
ERVRRKLEEVVKKVRDLSRRATEEVEEVIKEVRELVRRLKEENKRVVDEVRKRVEDTRK

SEQ ID NO: 16749 - protein, 60 aa, Artificial Sequence
  Synthetic
KSMEDVVRKLDELVKTDKEIADRVVKELKDIVKRVEELVEDIVTKSRASVERVRDVVTRG

SEQ ID NO: 16750 - protein, 59 aa, Artificial Sequence
  Synthetic
REAKELLDRLKRRLEKSTEEVKKKLETVLRELEEVIKRVKEELERVNRELRKVIEDAKK

SEQ ID NO: 16751 - protein, 59 aa, Artificial Sequence
  Synthetic
ELEKLIRDVVRENEESAKEAHRRIKEVVRTSEDLVREVRERVRRIVESSKRVVEEVRKK

SEQ ID NO: 16752 - protein, 56 aa, Artificial Sequence
  Synthetic
MEKLLRDLKKLIEDNERVVRELKKNLDDDSERVKRVADELLKNLKKDTKKVKDTAK

SEQ ID NO: 16753 - protein, 59 aa, Artificial Sequence
  Synthetic
DEAEDVVKRADDIVKRNRELLERVVRDLERIVRKNKDIVRKVVDEAKKLVKTVEDLSRQ

SEQ ID NO: 16754 - protein, 59 aa, Artificial Sequence
  Synthetic
KEVEDLLRRVEEKLRKSVKEVEELLDTVRRRLEDSSRDVKRLLKEVLDRLEDVLDKEEK

SEQ ID NO: 16755 - protein, 59 aa, Artificial Sequence
  Synthetic
SAVEEADKEVRRILKKNTDLVRRVVEEAKKILDRNEKRVREVFKELTRLLDELRKLIEE

SEQ ID NO: 16756 - protein, 59 aa, Artificial Sequence
  Synthetic
EEVERLLRELERRLEDSVRKARELLKDIERRLRESIKRSEELLRDVERRLKELEERLEE

SEQ ID NO: 16757 - protein, 60 aa, Artificial Sequence
  Synthetic
DVEEELKRVVEKLRDVERKVRELNKRVTDKNEDVVRTVRELNERVTRENRRVVEDIDRKK

SEQ ID NO: 16758 - protein, 56 aa, Artificial Sequence
  Synthetic
LDDVLRRLEELVKDLERLIEESVRYLERNVERSRELVERSLRYLKENVDRSRKLAE

SEQ ID NO: 16759 - protein, 59 aa, Artificial Sequence
  Synthetic
DEVREVVERARKLVKDNLDAARKAVKRLRELVKENLDTVRDVVRKLRKLVEDLKRLIRS

SEQ ID NO: 16760 - protein, 56 aa, Artificial Sequence
  Synthetic
KELADEVRELAKRSHEELKRLLDEVRKLLKDSERALRKLLEDVRREADKVAEEVRT

SEQ ID NO: 16761 - protein, 59 aa, Artificial Sequence
  Synthetic
SEVDEVVRRARELVKKNRDDVKKVVEDLRRIVKEDLDTARRVVKRLRELVEELKELIRS

SEQ ID NO: 16762 - protein, 56 aa, Artificial Sequence
  Synthetic
KELADEVDELMKDSDRELKRLLEEVRKLAKRSTDELERLIEEVRKELEDVLDEARQ

SEQ ID NO: 16763 - protein, 59 aa, Artificial Sequence
  Synthetic
SREEELLERLRRVVERNKKLVDDLADRADKVVKENEKLVRDLLEESRKTSEILDRLVKN

SEQ ID NO: 16764 - protein, 54 aa, Artificial Sequence
  Synthetic
LVEEVRRLSEKSNRDLKELVKDIERKLDKVHKDLEKVIEEVERSNERVKEEVKT

SEQ ID NO: 16765 - protein, 60 aa, Artificial Sequence
  Synthetic
SDAERIVEEAKRLVEENTELVERVLEKLERLVRENRTLVERVIEELDDLVRRIEDVVRRG

SEQ ID NO: 16766 - protein, 59 aa, Artificial Sequence
  Synthetic
KKLEKLLREVERLMEESHKRLKEVADTARRLMDDSERELDRLLREAEKKIRDVREEIRR

SEQ ID NO: 16767 - protein, 59 aa, Artificial Sequence
  Synthetic
SLVDEILKDLDRLVEENEKLVKKIVEDAEELVKRNTDLVEEVLRELKEIVETIRDLVRR

SEQ ID NO: 16768 - protein, 59 aa, Artificial Sequence
  Synthetic
EELKDVLRRVEEKIRKSNEKLEKLLEEVSRLAKRSDERLKKVLEDIKEEIRKVKEDLER

SEQ ID NO: 16769 - protein, 59 aa, Artificial Sequence
  Synthetic
SLEEVVKKAEDLLKRVNDELKKVSKKVRDDLRRVNEKLKTVVEDVLRKLEAVVDKIRKS

SEQ ID NO: 16770 - protein, 56 aa, Artificial Sequence
  Synthetic
VKDVDKRIRDVVRRHEEVVETNARRVDEVVKRHDKLVKDLERRVEKVVRELEEKVR

SEQ ID NO: 16771 - protein, 59 aa, Artificial Sequence
  Synthetic
SLDEIVKRAEEELKRLNEELKRVSDRVKERLDRVLDELRRISERIKELLERVKRKLERE

SEQ ID NO: 16772 - protein, 56 aa, Artificial Sequence
  Synthetic
AEDLRREVEEIIRRHKEVIRKNEEDVKRVLDTLREMLKKNKKLVDDMVRKLDETIK

SEQ ID NO: 16773 - protein, 55 aa, Artificial Sequence
  Synthetic
SEAEKVLEKVERVAREVLERIKRIVEHTKRVVEDVIRRADESVRRSEEIMEDVRR

SEQ ID NO: 16774 - protein, 56 aa, Artificial Sequence
  Synthetic
KEDVERLVRTVKEELDRLVDESRKLSRDVRETLEELVKRSEDVTRRVEETLREIVK

SEQ ID NO: 16775 - protein, 56 aa, Artificial Sequence
  Synthetic
DELERILEEVKKVVEEVVRRAEESVKKTEDVMRKVVERVARSLEESRRVAEEVERR

SEQ ID NO: 16776 - protein, 56 aa, Artificial Sequence
  Synthetic
EKDVKRLVDEVRKELEELVRRSEELTKEVKKTLEELVKESKEVVKDVEKKLREIEK

SEQ ID NO: 16777 - protein, 57 aa, Artificial Sequence
  Synthetic
REVDEAVKNNEEDAKESRRVVEEAVKRDEDIARDIERRAREVVERDKEIVDEVRRRV

SEQ ID NO: 16778 - protein, 60 aa, Artificial Sequence
  Synthetic
SKEVKDLLDENSKRSNEISREVKKDLERTVRENKKIVDEVRKKLEDTVDKNRRIVEEVTT

SEQ ID NO: 16779 - protein, 57 aa, Artificial Sequence
  Synthetic
SEVDKMLKRSNDIVREIARVVEEAVKTDERIMREILEHARKVVEEDKEIVDRVRKEV

SEQ ID NO: 16780 - protein, 60 aa, Artificial Sequence
  Synthetic
SEEVVRRLRTLVEENRKIVEDVKRELERTVRDNRRIVEEVAKRNHDTVRENKEIVDRVKT

SEQ ID NO: 16781 - protein, 57 aa, Artificial Sequence
  Synthetic
KEAEDVIELVRRILEEVDRRVRDVLRKDEESLRRVKKTVEEVLKRHKDIEDEVRRRV

SEQ ID NO: 16782 - protein, 60 aa, Artificial Sequence
  Synthetic
SEEVKRVLEEIVKKVEEIVKDVERKLRKTVEENEEVVRRVKRYLEKSVEDLEKVVRDVTT

SEQ ID NO: 16783 - protein, 56 aa, Artificial Sequence
  Synthetic
SAEDILREVEELVRRTRKHLEDSLREVTKLVEETKREADRILKEVRDRVKEVIERG

SEQ ID NO: 16784 - protein, 59 aa, Artificial Sequence
  Synthetic
EEVLKTVREELRDIIRRSVEHNRDSLRRLREIIERSLRHVEEVLERVRKEIERIKRETK

SEQ ID NO: 16785 - protein, 56 aa, Artificial Sequence
  Synthetic
SAEDILREIKRLVEETERLLKRILEEVRKLVEETRRRLETILRRVEEKVRRLVEKG

SEQ ID NO: 16786 - protein, 59 aa, Artificial Sequence
  Synthetic
EETLKRALDEARKIIEESKKHVKDVLRKVTDEIRESKKDVERVEDEVDKRIREVDERTK

SEQ ID NO: 16787 - protein, 60 aa, Artificial Sequence
  Synthetic
SIDEVAEEVERLLEEVKETSREVLERVKRELEKIIDTSRRILEEVRRLLERVLEEVERRK

SEQ ID NO: 16788 - protein, 59 aa, Artificial Sequence
  Synthetic
DRDVKRVLDKVRKKIEENKDTVRRVEEEIKKLIEDNKRTSEKVRKEVTDIIEEIKEEIK

SEQ ID NO: 16789 - protein, 56 aa, Artificial Sequence
  Synthetic
DVEDVVREAEDLLRKLEEKSRKVVEDAKRLLDEVKRKMEESVKEAKRLLDEVLRKS

SEQ ID NO: 16790 - protein, 59 aa, Artificial Sequence
  Synthetic
KKIVEEVRRRVEEVVRRDEKSVEDLKREVDRVITELDRLVKRNTEEVERVIRRLDEETR

SEQ ID NO: 16791 - protein, 60 aa, Artificial Sequence
  Synthetic
SEEEDAERLLRDLKRRADEVVKESEKILEDIVRDAERVLRESKRISEEIVRRADEIRRKV

SEQ ID NO: 16792 - protein, 55 aa, Artificial Sequence
  Synthetic
RLVEELRRLVEEVRERLDRSVKKTKELLKEVIKELEKLLKKDEDDVERVIRRLED

SEQ ID NO: 16793 - protein, 60 aa, Artificial Sequence
  Synthetic
SEVEDILRRVEKRARDSLKHLEDVLRKVDKRVRESLDNLRRVLEEVERIVRELERLLDEG

SEQ ID NO: 16794 - protein, 59 aa, Artificial Sequence
  Synthetic
ERLLEEIVRRLEDSLRKVEEIARRIEKRLRDSLRETKRIADEIRKRLEDALRRVEERAR

SEQ ID NO: 16795 - protein, 60 aa, Artificial Sequence
  Synthetic
SDVEKILDDVRKDAERSLENLKEVLEKVEEEVRRSLEDLRKVLEDVERIARKLEELLKEG

SEQ ID NO: 16796 - protein, 59 aa, Artificial Sequence
  Synthetic
EELLRRIERTLRESLEAVKRIAEEIERTLEESLREVERIVKEMEDLVRAALKRVEDKAR

SEQ ID NO: 16797 - protein, 60 aa, Artificial Sequence
  Synthetic
SEVEEILRRIKEEVRESLEDLRRVLEEIEKKAKESLRELKEVLERVKEIADKLKRLLDEG

SEQ ID NO: 16798 - protein, 59 aa, Artificial Sequence
  Synthetic
EKLLRDIKRDLERSLEAVDKIVKEIMERIKESLKATERIVKEMKDLITRVREEVKRRAE

SEQ ID NO: 16799 - protein, 56 aa, Artificial Sequence
  Synthetic
DEVEELKERAKRSNEELKRKVEELKKRAKKAIDDVRRVVDENKKLVKEAIDRLRKT

SEQ ID NO: 16800 - protein, 59 aa, Artificial Sequence
  Synthetic
KETLKKLLEELKKLVDESRRRLDELRKEVEKKVEEMLERARRLLKKTEDLVREVKRRVD

SEQ ID NO: 16801 - protein, 55 aa, Artificial Sequence
  Synthetic
DELKELEDRLRRAEEEARRLLEEIKKRLKESNEELKRLVEENEKLVKEALRRLEN

SEQ ID NO: 16802 - protein, 59 aa, Artificial Sequence
  Synthetic
KDVLRKLLEEVERLVKRVLDELRALLKEVEDLVRKSVEDLRKLLEETRKLVREMEERVR

SEQ ID NO: 16803 - protein, 55 aa, Artificial Sequence
  Synthetic
SLVEKLEKRLRDVIKTIEDIIRENEERLRRSNRELEKLVDENRKLVEEVLKRLAD

SEQ ID NO: 16804 - protein, 59 aa, Artificial Sequence
  Synthetic
ERVLEKLLREVEELAKRVLTELRRLLRETERLVRESEKRLRDLLRDTERLAREVEKRVE

SEQ ID NO: 16805 - protein, 55 aa, Artificial Sequence
  Synthetic
SLVEDLKRELEKAKEEIEKIVRDLERELDRVIKENERLIRENEDTVRKALERLRR

SEQ ID NO: 16806 - protein, 59 aa, Artificial Sequence
  Synthetic
EDVLRELKDRVRRIVEEVARRLEELLKKVKDLVKKSLKTNEDLLRKTEELVRRAEERVK

SEQ ID NO: 16807 - protein, 60 aa, Artificial Sequence
  Synthetic
SEVEEVLKRLKELVDTVLEELKDVIRRIEELLERVRRDNERTIREDEELVRKVLDELRKI

SEQ ID NO: 16808 - protein, 56 aa, Artificial Sequence
  Synthetic
AEEIERVIREAERRLKKLLDELRRLVEEVRRELEELDERLKRSSEEAKKRLDELVK

SEQ ID NO: 16809 - protein, 60 aa, Artificial Sequence
  Synthetic
SEVERVLEDLRRLVRDVEEKLRRIIERDRRLVEEVERENRKTIRKIEELLRKVLEELKDI

SEQ ID NO: 16810 - protein, 56 aa, Artificial Sequence
  Synthetic
AERIEDVVREAEKRLRELLKELEKTSRDLKKRLEELDRELKALVEKVERDLEELRK

SEQ ID NO: 16811 - protein, 60 aa, Artificial Sequence
  Synthetic
SEAEELLRRLKELVDEVLKRLRDMIKRSEDLARDVLRKHEDLIRKLEELMKKVEDLADKI

SEQ ID NO: 16812 - protein, 59 aa, Artificial Sequence
  Synthetic
EEVVREIERIVREVTERLRRLVEENAEVVKRVEKELKELNDELRRVVEEIVRKAKEKTK

SEQ ID NO: 16813 - protein, 60 aa, Artificial Sequence
  Synthetic
SEAEELLKRLEDRAEEILRRLEEILRTSRKLAEDVLRELEKLLRESERRIREVLEELRRI

SEQ ID NO: 16814 - protein, 59 aa, Artificial Sequence
  Synthetic
KEVVDEIKRIVDEVRERLKRIVDENRKIVEDARRKLEKIVKENEEILRRLKKELRELRK

SEQ ID NO: 16815 - protein, 60 aa, Artificial Sequence
  Synthetic
DMRKELEKRVEEIRRAVTELVKRNEDIVREVKKRVEELVKRNEDITKKAEDDIRDLVRKR

SEQ ID NO: 16816 - protein, 59 aa, Artificial Sequence
  Synthetic
EEKLRRLLERLEDIARRVLKYLEEDLRETEKLAKEVLDRARKILEETKELVKDVLEKAR

SEQ ID NO: 16817 - protein, 60 aa, Artificial Sequence
  Synthetic
DMDEELRRVVKEIEDELRRLVEENRDVVRKVEKLNRDLLKRNEDITDEARKRVEDLVRKR

SEQ ID NO: 16818 - protein, 59 aa, Artificial Sequence
  Synthetic
REKLEKLIRRLREIAKEMLEYAKRDIERTKELAKRSLERHKESLDRTEKLVKEVLDKAR

SEQ ID NO: 16819 - protein, 60 aa, Artificial Sequence
  Synthetic
DMVRDLERIVEKIKEDIKELVKRNREVTEKVVRDVEELVKTNREVVREATRRVEKLVEEE

SEQ ID NO: 16820 - protein, 59 aa, Artificial Sequence
  Synthetic
EDTLRKLLKTLRELARRVLEEARKIIERSKELAERVLRYLKRDIEESKKIVKEIEDRAR

SEQ ID NO: 16821 - protein, 60 aa, Artificial Sequence
  Synthetic
DMERELDDVVRKAEEDNRRLLKENEDIVREVVDRNARLLEENRRVVEEAVRRVEDMLRRR

SEQ ID NO: 16822 - protein, 59 aa, Artificial Sequence
  Synthetic
ERKLRKLIDDLRKLVRESLEYNKDDLEKTKELARRSLKYNKEDIDRSREIVRDVRRKAQ

SEQ ID NO: 16823 - protein, 60 aa, Artificial Sequence
  Synthetic
SVIEALEEIAEKIERDVRKLVEENREVVKEAEKRVEEILRTNSKRSEEVRREVEDLVRKD

SEQ ID NO: 16824 - protein, 59 aa, Artificial Sequence
  Synthetic
ERVLEELLRRLEEIAKRALEYLTRDIEETKRLVEEVLKRLKEILDKTDDLAREVLERAR

SEQ ID NO: 16825 - protein, 60 aa, Artificial Sequence
  Synthetic
SEVEKIEEDLKRLVKRLREINEESKKRLEELIRTAEEINKKTTDELERLAEEVDRLVKRV

SEQ ID NO: 16826 - protein, 59 aa, Artificial Sequence
  Synthetic
REAVDRLRRVVDEIRKEARKLNEEIRKRVEDVVRKLDKMDEDLRKRVEEIERKVREATR

SEQ ID NO: 16827 - protein, 60 aa, Artificial Sequence
  Synthetic
SEVEEILERLRRLVKEVDKRNTDSLDTLKRLIDELERKNRDSLRRVDELAKELEKLARRV

SEQ ID NO: 16828 - protein, 59 aa, Artificial Sequence
  Synthetic
KDAVTELEKDVREIKKRLDEMDKRLKDVVDEVRRRAEEVNRRIERLVREIEKRAREEVR

SEQ ID NO: 16829 - protein, 60 aa, Artificial Sequence
  Synthetic
SEAEEVLERLKRLRETVKEENDDSLRKDRELVDRLEKDNRDSLRKLKELIERVREILKRV

SEQ ID NO: 16830 - protein, 59 aa, Artificial Sequence
  Synthetic
KDVVETVKRVVEEIEKELEEANRRLEKSSREVEDRIRKANKRLEEVVDEVREEVDKATR

SEQ ID NO: 16831 - protein, 60 aa, Artificial Sequence
  Synthetic
DEVREVLTRLEELVRRVTKELEDSLRNTERVRRTIRKLAEEVNRDSKRLKDEVKKVLEKI

SEQ ID NO: 16832 - protein, 59 aa, Artificial Sequence
  Synthetic
EEAVETLKRKVEEIERRLKRMVEEDRKTIEEIEEEVRRLVKTNREIIKEIVETLREAVR

SEQ ID NO: 16833 - protein, 60 aa, Artificial Sequence
  Synthetic
KEVEEVRTRLKKLRDDVKRLLDEVNEESKRLAEEVRRRLEESNRNTERVVEEIERVIERI

SEQ ID NO: 16834 - protein, 59 aa, Artificial Sequence
  Synthetic
DKVVDEVRRRVEEAEREVKDMVRTNNEIVRRIVEEARRLVDEDRDRIKKIEERLRRELQ

SEQ ID NO: 16835 - protein, 60 aa, Artificial Sequence
  Synthetic
SEAEEVLREVDELAKRLERVATESLKNTKKVVDDVRREVKRVNERSEEIMRRIEDVLRKI

SEQ ID NO: 16836 - protein, 59 aa, Artificial Sequence
  Synthetic
EELIREIERIVREIDKRARELVERDNREVERIVEELKELVKTNNDIVRRVVEKLKETVR

SEQ ID NO: 16837 - protein, 58 aa, Artificial Sequence
  Synthetic
SEAEKILEDLKRIVRRIKEELRRVLDHTRELVERIRRLAKKILDDTEKIVRDIRDKAE

SEQ ID NO: 16838 - protein, 59 aa, Artificial Sequence
  Synthetic
EDVVRELKREVERIKREVKKMVDDNRRTVEKIKRDAEKMVRDNEELSRRIEKDVDDKTK

SEQ ID NO: 16839 - protein, 58 aa, Artificial Sequence
  Synthetic
SEAEKIEERLKRVVEKLRRDATRVRKHTDDLVKEITDLAEESKRRVEEIRERVKRLRE

SEQ ID NO: 16840 - protein, 59 aa, Artificial Sequence
  Synthetic
EKVVKRLEDEVKRIKDEAKEMVDENKRKVDEIRKELRRLVEENRRESEKIKKKLDEDLK

SEQ ID NO: 16841 - protein, 58 aa, Artificial Sequence
  Synthetic
DEIREILRRIREVVADATRRAKESLDNLKRVVEEVDRRVKESLDRLKEIVDRVRELSK

SEQ ID NO: 16842 - protein, 59 aa, Artificial Sequence
  Synthetic
KDVVKRVEDEVRDIRRVLEEMVRRDKKVVDEIRERLKEAVRRNEEVSRKIKKDLKDETK

SEQ ID NO: 16843 - protein, 57 aa, Artificial Sequence
  Synthetic
SMEERLREVVTEIRKKVEKLLRDNRKSNKEIKETVDDLVRRNRELTERAKRRVDARG

SEQ ID NO: 16844 - protein, 59 aa, Artificial Sequence
  Synthetic
EREAEELLRELADVVRRAEELAERSLRESEKVMEDITREAERILRDTKRLIEEIERRAR

SEQ ID NO: 16845 - protein, 57 aa, Artificial Sequence
  Synthetic
SLREDLEKDVRDIVREIDEAVERNRRSVEEVDKRVEDMLKNNRDSNKKIEEDVRRAG

SEQ ID NO: 16846 - protein, 59 aa, Artificial Sequence
  Synthetic
EEDAKRLKDELREVVDKIRRDLKKSNDDIRRLVEKIKRELEELNKRSRELVERARETVR

SEQ ID NO: 16847 - protein, 57 aa, Artificial Sequence
  Synthetic
SLEETIEEKVRRIREEVRRMLENNRRINEEVDRRVTEMVERNRKTVEEVVREVDRDG

SEQ ID NO: 16848 - protein, 59 aa, Artificial Sequence
  Synthetic
EEDAKRLLEEVEDIVRRLRKELEDSNRKSRKLVEEIRKRAEESNRELRELIKRIKDRAR

SEQ ID NO: 16849 - protein, 56 aa, Artificial Sequence
  Synthetic
DVLERLAEVVRRVVKEAEDLVRNNRRLNKEVEDEVDELVRNNRRLTKDVVKKVEDA

SEQ ID NO: 16850 - protein, 59 aa, Artificial Sequence
  Synthetic
KEEVKRLEDELRKVVDKVRKDMKRSNDDSERLREDITRKAKRLNEETRKVMEDVTRRAT

SEQ ID NO: 16851 - protein, 60 aa, Artificial Sequence
  Synthetic
KEAEELIREIERKAEEVRKENERSIRENERLAREVEKRLKRTNEELKRLVRELEEKLKRD

SEQ ID NO: 16852 - protein, 59 aa, Artificial Sequence
  Synthetic
EELIRRLEEVVKRIREDLKKLDDDLKRSVEEIERRLKKVIEDNRETLERARRRLDERVK

SEQ ID NO: 16853 - protein, 60 aa, Artificial Sequence
  Synthetic
DEAEEILEELRRLIEEDKKTVEEVLRRDEETIKRLEEENREALKDNRRLIEELEDIVRRI

SEQ ID NO: 16854 - protein, 59 aa, Artificial Sequence
  Synthetic
EKVREKVERILDDLRRVVEETVKRAEDLLRKSREVVKRVDEELKESHDRLDERIKRDLK

SEQ ID NO: 16855 - protein, 60 aa, Artificial Sequence
  Synthetic
DEAREILKTLKDLIKELEDRNREVLERDKKTIEDLERRNARVLEENKKLIDEIRRIAKDI

SEQ ID NO: 16856 - protein, 59 aa, Artificial Sequence
  Synthetic
RSVEEALKKILRELEKKVEEVDRRLKRILEDSRRVVRRVDEEARKSHEELKRELDRIRK

SEQ ID NO: 16857 - protein, 60 aa, Artificial Sequence
  Synthetic
KEAEDLLRKLRELIKKLDDTNRRVLERDRKTIEELERRAEKILTDIERLIRELEDRVRRT

SEQ ID NO: 16858 - protein, 59 aa, Artificial Sequence
  Synthetic
EKVVEKARRILKELRDRIREVDKRLRELLEESRKRVEEVERELERLVRELEKKVREAEK

SEQ ID NO: 16859 - protein, 61 aa, Artificial Sequence
  Synthetic
SEVEDVVRKIKEILERLKKEVDDVLDRNRKLLEELKKRADEVLKRNKDLLETLKREADRDG

SEQ ID NO: 16860 - protein, 56 aa, Artificial Sequence
  Synthetic
KDELKRLLDELREIVKEAEERLRKSDEDLERIIREVKKRLKESNEELERTIREVER

SEQ ID NO: 16861 - protein, 58 aa, Artificial Sequence
  Synthetic
REVEEVVKEAEDLLRKLRELAKEFLTRHKKLIRDVTEKVKEVLKRSADSIRELEKIID

SEQ ID NO: 16862 - protein, 59 aa, Artificial Sequence
  Synthetic
EDAVRKLEEMVERLARIVEDVERKLKKLNKELEEIVRDAKRRLERLNEELRRRIREAER

SEQ ID NO: 16863 - protein, 58 aa, Artificial Sequence
  Synthetic
DEDEDIERKLKELIDRLREEVKKAEDEHKELIKRDHRRVEEVERRSEKSIKDLRDLAK

SEQ ID NO: 16864 - protein, 59 aa, Artificial Sequence
  Synthetic
EDVARRLEELVEELEDIVRKVKESLRRLNEELRKNSETVKKKLEDLNRELRKDIEEKRR

SEQ ID NO: 16865 - protein, 58 aa, Artificial Sequence
  Synthetic
SEAEKVLEEAKRLIEELERRVREVLKRSKKTIEDLRREVDRVVKEHKKLIRELREIIK

SEQ ID NO: 16866 - protein, 59 aa, Artificial Sequence
  Synthetic
EEVAKRLKDVLRELKDLVEKIEEEARRLNEELKEIIDRARKTLEDLNRELEEVVRRARK

SEQ ID NO: 16867 - protein, 59 aa, Artificial Sequence
  Synthetic
SEVDEVRRELERVITDDKRLVDESRRKNEKSIRDDEELIKTSRRINEESIRRLKELVER

SEQ ID NO: 16868 - protein, 56 aa, Artificial Sequence
  Synthetic
EETLRRLVKRLDETSEELEDENRRLNETLKRSSDELRKTNEELNKRLKEVVDRAKK

SEQ ID NO: 16869 - protein, 61 aa, Artificial Sequence
  Synthetic
SVEEKIKEMVDKIKDSVRRSTEENDRLVKEIDKVLKEAEKRNRDLLKEAADVLKRVLDKRR

SEQ ID NO: 16870 - protein, 56 aa, Artificial Sequence
  Synthetic
IDTVLKDMKKILDDNKKLVDDSRKKHKESIDRLRKLVKDSLDEHRESIERLERAAR

SEQ ID NO: 16871 - protein, 60 aa, Artificial Sequence
  Synthetic
REVEELERELEESNKELRKLIKELDDLLRETNKRLNDLIRELKERLDRVLEELRKIIKDD

SEQ ID NO: 16872 - protein, 59 aa, Artificial Sequence
  Synthetic
REVEKLVEEAIKRNEDLVRTVERKVDEAIKENRRSVEKVAEEVKKAEEELERIVDTVRR

SEQ ID NO: 16873 - protein, 60 aa, Artificial Sequence
  Synthetic
REVEELKKEADKTNEDLNRLIKELEERARESNRELKRLIDELRRRLEEVLKRLKDIIDKE

SEQ ID NO: 16874 - protein, 59 aa, Artificial Sequence
  Synthetic
EEVERLVTEMIKRNRTSVDAVRRKVKEMIDRNKALVETVRDEVRRAREKLRDILRKAEK

SEQ ID NO: 16875 - protein, 59 aa, Artificial Sequence
  Synthetic
SIEEIVRKVKEDLKRSLDELRKVSEDMARRLRESLKELEEVVREMEERLKRILDDIRRK

SEQ ID NO: 16876 - protein, 56 aa, Artificial Sequence
  Synthetic
ERDLKRRVDEVLTRSKESVDENKRTADRVLEESRESIKELKERAKRLLERLEEERK

SEQ ID NO: 16877 - protein, 60 aa, Artificial Sequence
  Synthetic
KEVEELEREARRMLEHTKRLIDEVRDRAKKSLDNTRRVDREVEKLVEDTERRLDELRKRG

SEQ ID NO: 16878 - protein, 59 aa, Artificial Sequence
  Synthetic
EELKRTAERMIEENRRLVETLKRVLEEAIRRNEELVKTLLRKLEESDKKIRKLIEETRT

SEQ ID NO: 16879 - protein, 60 aa, Artificial Sequence
  Synthetic
SELEELRDRLKEILEHTKKLIKESVERLEESLRNTRRVIRKVEEEVERTRTKLDDLRRRG

SEQ ID NO: 16880 - protein, 59 aa, Artificial Sequence
  Synthetic
EEMADVARRVIEENKRLVEENEDRLRKAIERNRELVEEVKKRLEDSDREIERLIREVKK

SEQ ID NO: 16881 - protein, 60 aa, Artificial Sequence
  Synthetic
DEVETLRREARKLLERIKREIEEVRRRLKESLDNTKRVEDEARKLVKETKDKLKRLAERG

SEQ ID NO: 16882 - protein, 59 aa, Artificial Sequence
  Synthetic
EEMRKVAEDMEREIRRLITDLRRELEEAIERNEELVRRLARELERSDREIKKRIDEIET

SEQ ID NO: 16883 - protein, 60 aa, Artificial Sequence
  Synthetic
SELDELRKRAKRSLETTEELIRRSRKLMRESLDNTRRVEEKVRRLVEKTLRDLEDLKRRG

SEQ ID NO: 16884 - protein, 59 aa, Artificial Sequence
  Synthetic
REMEETAREAIERNRKLVEDNERDLKKAIEDNEKLVRDLKRELERSDEEIKKLIREVKN

SEQ ID NO: 16885 - protein, 60 aa, Artificial Sequence
  Synthetic
DSREELRREAKRLLDDIKRLEEKVERLAREVLKHTEELDEKLKRLVEETLKKLEDLRRRG

SEQ ID NO: 16886 - protein, 59 aa, Artificial Sequence
  Synthetic
EELKRTAEEMERRIRELIKRLKDRLEDMIRRNKELVDRLKKKAERSDEEIERLIRETKK

SEQ ID NO: 16887 - protein, 60 aa, Artificial Sequence
  Synthetic
KEIEDVVRELERKVRENKRRNDEVIKRLERLVEKNTELVRRLIRTLEKLVEDLEDIVRRI

SEQ ID NO: 16888 - protein, 59 aa, Artificial Sequence
  Synthetic
EEAKKVAEDVERRIRRSVEEARRLLEEVKRKMEESVEESKRLLKKVEDEAKDVVDRARK

SEQ ID NO: 16889 - protein, 60 aa, Artificial Sequence
  Synthetic
SEIDKVIEELKDLVRKNEKRNRDVVRRDDKSVKDNTKRVEDVIRDLDRLIRELREIVERI

SEQ ID NO: 16890 - protein, 59 aa, Artificial Sequence
  Synthetic
KRAAELAKEVIDRMEESVKEAERLLRELKRKSEDSVRKSKELLDEVEKKVEEVVREAER

SEQ ID NO: 16891 - protein, 60 aa, Artificial Sequence
  Synthetic
EEIERAIEKVEREIRELEERVREIIERDRKSVEDNSRRVRTVIKELEKLVEELRKTVKDI

SEQ ID NO: 16892 - protein, 59 aa, Artificial Sequence
  Synthetic
EEARKLAEELRKEIKRVVDEVRKLLRDLERKSKESVREAEELLKRVRDELKEVVDRTEK

SEQ ID NO: 16893 - protein, 56 aa, Artificial Sequence
  Synthetic
SLREAVERLRKRHEDVVRELEKLVRRVKEELERVNKDLRKVVEEVRRRLEKVLEDA

SEQ ID NO: 16894 - protein, 55 aa, Artificial Sequence
  Synthetic
TDLLKRADDNVKRNRDLIRRLKEKADEIVKRNEDLIEDARRKADEMIKDLEEKAR

SEQ ID NO: 16895 - protein, 59 aa, Artificial Sequence
  Synthetic
SEVDELRERAKRIVDDLRRKIEEVVKRLEDSDEENKKLIEKAVRELEKIIRDLEEVIRR

SEQ ID NO: 16896 - protein, 59 aa, Artificial Sequence
  Synthetic
RELKELVDRLDKEATDVLRKVREDLRKAIERSERSHRRLEKLIEEIERELKRVVDEVTR

SEQ ID NO: 16897 - protein, 57 aa, Artificial Sequence
  Synthetic
DIEELLRKVAEEITRSVKESRDRLDEVEKKAREVVERSEKRLREVEEKIERVVRRIV

SEQ ID NO: 16898 - protein, 59 aa, Artificial Sequence
  Synthetic
EEDADKVLKEAEELVRRNRRLVEEVLRRLEEIVKRDEDLVRKVLKEADEIVRRLEEAAR

SEQ ID NO: 16899 - protein, 59 aa, Artificial Sequence
  Synthetic
SRVEDVVRRLKELNDENSEDSRRVLEKLKDEVRKNSDEIEKAAEELKEKLTRLKRLIEG

SEQ ID NO: 16900 - protein, 59 aa, Artificial Sequence
  Synthetic
KEVKELVKRVRETSKKSLKEDEDMVREVKKKLDDSLRRVDELVRRVEEEARRVLEEVKK

SEQ ID NO: 16901 - protein, 59 aa, Artificial Sequence
  Synthetic
DEVERVVKELRDKVDRNSREIEKAVTELRKIVKRNSDESKEVIERLEELLRRLEELIKS

SEQ ID NO: 16902 - protein, 59 aa, Artificial Sequence
  Synthetic
SRVKTLVDEVRKRAEDSLDTVKKLVDRVRERLDESLRDDKRLVDRVREEAERVVREVEK

SEQ ID NO: 16903 - protein, 60 aa, Artificial Sequence
  Synthetic
SDVEKIFDELRKLLEDLRRKVEEVFRRLKELVERNTRLNREVVKELKKTSDDLRDMVRRT

SEQ ID NO: 16904 - protein, 59 aa, Artificial Sequence
  Synthetic
EKVRKLVKEIRERIEKVLRDAEELLKEIEERVKESKKEAKKLLDEVRESVDDVKRKAEK

SEQ ID NO: 16905 - protein, 60 aa, Artificial Sequence
  Synthetic
SDVEEIVRKLDKLVEDNTRENEEAFKRLDETSKKLEEEVERVFRELKKLVDDLEKIIRDI

SEQ ID NO: 16906 - protein, 59 aa, Artificial Sequence
  Synthetic
EKVRKLVREVEKKVDESTERAERLLKRVEDSVRDVLRRAKELLDEIRKRVKDVERKAEK

SEQ ID NO: 16907 - protein, 60 aa, Artificial Sequence
  Synthetic
DEAREIRRRLKEVVDEVRKRLEDSLEEIDRRAKEVLEKVKRSLDRLRKVAEEVLDKLRRK

SEQ ID NO: 16908 - protein, 55 aa, Artificial Sequence
  Synthetic
ERVKRRVDEVVRKLREIVRKLTEENKRTVEDLERIVERLDRDNRKMVEDMEREVK

SEQ ID NO: 16909 - protein, 60 aa, Artificial Sequence
  Synthetic
REVEELKKRLEKIVEELKRIVDDHKRKVERIVEELEKLVEDHKRTVEEIVERAKRIVEKD

SEQ ID NO: 16910 - protein, 58 aa, Artificial Sequence
  Synthetic
ERLEEVAREIEEALKKVKRDLKESNRELEEVADRVRKELDRSDEDLERRMREVREELK

SEQ ID NO: 16911 - protein, 56 aa, Artificial Sequence
  Synthetic
SVLETLAERVKEVKDNLRKLVEDLKRLVDRIKETLDKLVEELRELVERLDDRLRKN

SEQ ID NO: 16912 - protein, 62 aa, Artificial Sequence
  Synthetic
RDLLKRLEEIMRRLEKEHKDVSKLLRDIEREIDRVHREVKRKIEEIVRKVRKSLEEVKRRAK

SEQ ID NO: 16913 - protein, 57 aa, Artificial Sequence
  Synthetic
SRAETVLKEVTDKIKKLKDSSDELLRRNKENIDELKKSSEELLRRLTKAIEEIEKAN

SEQ ID NO: 16914 - protein, 56 aa, Artificial Sequence
  Synthetic
DEVVKRVRDLLDTVRRRNEKVNEDVKRMNDKLRRDNEDVIRRVEKLLRELEEKRRT

SEQ ID NO: 16915 - protein, 59 aa, Artificial Sequence
  Synthetic
DLEEVVKEARRLLDTVRKKLDESIKEARELLREIEERFKKSADEVREELKRVEDELRRK

SEQ ID NO: 16916 - protein, 56 aa, Artificial Sequence
  Synthetic
VRELRKEVEDIIRRLDELVKKNTEDNRRVIKELRELVEEHTRRVKKIIEDLEREVR

SEQ ID NO: 16917 - protein, 60 aa, Artificial Sequence
  Synthetic
SVEEVVEEAKELLKEVEEELKRSAEEAEKLLRDVARKMEESVERLRRLLKDVERALREKN

SEQ ID NO: 16918 - protein, 56 aa, Artificial Sequence
  Synthetic
LRRLREKIEEIVRRLRELVRRHNEEVRRIIETLEELVRRNTETVEREVRRLRDEVR

SEQ ID NO: 16919 - protein, 59 aa, Artificial Sequence
  Synthetic
SVEKVLEDARRLLEEVKDRLKKSIDDAEKLLRELEKRLRESADEARRLLRRVKELLERK

SEQ ID NO: 16920 - protein, 56 aa, Artificial Sequence
  Synthetic
LRELKREIEEIVKRAEDLVRENTEKNKRVVDTVEELVRRHNEEVRRVVKELEERVR

SEQ ID NO: 16921 - protein, 59 aa, Artificial Sequence
  Synthetic
GLDEIIKRLREVLEKIREELRKSSEELERLLKRVDDDLERSNKELEELLERVRKKLEDS

SEQ ID NO: 16922 - protein, 59 aa, Artificial Sequence
  Synthetic
EELLRELEKEIKRVDEDLKRLVEEHEELVRDVLRKLEKLVREHKEKVRERVERADDKVR

SEQ ID NO: 16923 - protein, 59 aa, Artificial Sequence
  Synthetic
SLEEVLKELKKIVEDVTRRLEEMLRESKETSKEVEKELKKLDDEIREIIERAEEDLRRA

SEQ ID NO: 16924 - protein, 56 aa, Artificial Sequence
  Synthetic
EEILKEVAERLKKTAEEVKRELEKFIEDDRKRADEVRRENEETLKRIEDIVRELKR

SEQ ID NO: 16925 - protein, 58 aa, Artificial Sequence
  Synthetic
SALEKIMKDLEKSIEDVRRKLEDILRKLRKSSEEVKRRIEDIERKVDRAAKEILRSKG

SEQ ID NO: 16926 - protein, 59 aa, Artificial Sequence
  Synthetic
EDVVRRLKRTVEEVHKRNEDVVREAEKLVEKLSRINEEAVRRLADIVRRLEEELRKAEK

SEQ ID NO: 16927 - protein, 57 aa, Artificial Sequence
  Synthetic
REKEDVLRRIERIVREIERRLRESLKRNREIVKDLERLARRVLKESEDNLRKLKEDR

SEQ ID NO: 16928 - protein, 56 aa, Artificial Sequence
  Synthetic
REKLRKRLEEMKEELRKADERAKEIDTRTKRLVDEAVRKLEKLVEEHRRMTDEIRR

SEQ ID NO: 16929 - protein, 63 aa, Artificial Sequence
  Synthetic
REDETLEKILRRIEEIVRRLVREAEDVVRRDRETIERLVRENEKAVKEIKDIVDELTRLKKDK

SEQ ID NO: 16930 - protein, 58 aa, Artificial Sequence
  Synthetic
ESVREAAERLKDILRRLEELLRKVAKDLKKSNDELERLSEESVRRLREILKRLEDALR

SEQ ID NO: 16931 - protein, 60 aa, Artificial Sequence
  Synthetic
SEVEKILEDLDRSAKEAADRIKEIVDRLTELVKDLKKKNEESLEELDRLVKELADLLRRG

SEQ ID NO: 16932 - protein, 59 aa, Artificial Sequence
  Synthetic
EDKLRDIARRVREVNKRLEDLIRTVARAVRKALKDSEDLVREIAKRVEKALEDVRRAAK

SEQ ID NO: 16933 - protein, 58 aa, Artificial Sequence
  Synthetic
REVEEVIRKLERILEEAERMSRESERKLREILEKLERAIREIREELERIHKELEEKAG

SEQ ID NO: 16934 - protein, 56 aa, Artificial Sequence
  Synthetic
RDRLDKAVEELRKEIEEMLRRSDELVKRLDEKVKKVLKELREHVKRDKEKVDKDAE

SEQ ID NO: 16935 - protein, 58 aa, Artificial Sequence
  Synthetic
SSRERVIKKLEESLERLERLARKIKEDLERINRDLERLARKVEEELKRIHEELERRSG

SEQ ID NO: 16936 - protein, 56 aa, Artificial Sequence
  Synthetic
EDELDKRVKDLHRENEREIRRLEDHVRRDRERLEEALRDLEAHVKRDKDKLDKDAK

SEQ ID NO: 16937 - protein, 56 aa, Artificial Sequence
  Synthetic
SEIEDVARRLEEINKKSEDMARRIKEELEKVDEESERLVREVAKRLDEVLKRVRDD

SEQ ID NO: 16938 - protein, 56 aa, Artificial Sequence
  Synthetic
AEELKKRVEDLKRKNEDLIRRLEEKVRRLKKRNRDLIEELKKLVKELKDEAKKTSD

SEQ ID NO: 16939 - protein, 56 aa, Artificial Sequence
  Synthetic
SEEERIEKRLREIHERHKRMLDEIKKRLDDSLKTLEDLIRDVTRELEKVLKKAEDD

SEQ ID NO: 16940 - protein, 56 aa, Artificial Sequence
  Synthetic
AEDLDREVKRLEREIERSIKELEELVRKLHKENEELIRELEELVERLKRKIDETSR

SEQ ID NO: 16941 - protein, 60 aa, Artificial Sequence
  Synthetic
SEVEDAERVVRELEREVREEVKKLRKHVKETRDRDKDTVRRVEEKVKRLREKVKRVEDAR

SEQ ID NO: 16942 - protein, 58 aa, Artificial Sequence
  Synthetic
RAVREVLKELERVLRDAKRELDRVREEHERSHKELRDMLDRVKKELEKILEKLERALR

SEQ ID NO: 16943 - protein, 56 aa, Artificial Sequence
  Synthetic
EDKERVEEKIKRSLEEARREAERVRDKLRKSEEEIDRVMKRVLAEIDRVLKEVKEA

SEQ ID NO: 16944 - protein, 56 aa, Artificial Sequence
  Synthetic
SKELEDIVRRLEERNRRTVEEVERLVDEHNKRLREAAKELKKLVDDLERKLREDTR

SEQ ID NO: 16945 - protein, 56 aa, Artificial Sequence
  Synthetic
SEIEEVKKKLEKILRDHNRVVEEVAKEHEKILRDHNRVIREVKEELDRVLKKLRDD

SEQ ID NO: 16946 - protein, 56 aa, Artificial Sequence
  Synthetic
AEKLERLVKRIKEEVEESVKRLKDHAKENREDVKRSVEELRDVVRRLEERIKESAD

SEQ ID NO: 16947 - protein, 56 aa, Artificial Sequence
  Synthetic
SEIEEVARRLDEILERHNDVLRKVKEKHEEILRRHRKRVREVEEELKKILKELREK

SEQ ID NO: 16948 - protein, 56 aa, Artificial Sequence
  Synthetic
AKDLKRKVDELRRKAEESMKEVERHVRENAEHVKRSVEELEEDVRRLRKKLEEKER

SEQ ID NO: 16949 - protein, 56 aa, Artificial Sequence
  Synthetic
DEKEKVKEDLDRILEEHRREVEDVERKHRKILKDHEEVVRRVREEHEKILKRLKDN

SEQ ID NO: 16950 - protein, 56 aa, Artificial Sequence
  Synthetic
AKKLEDLVRRLKEHVDRSRERLEKHLRENKRHVEESAKRLEKHVRDNEEDVKRKST

SEQ ID NO: 16951 - protein, 60 aa, Artificial Sequence
  Synthetic
KEEEDLEREVKRLEDKVREDAKKLEEVVKTVEKLVRDDARRNEEVVKEVADRVRRLTERK

SEQ ID NO: 16952 - protein, 55 aa, Artificial Sequence
  Synthetic
EDVIRKMEEIIKRLEEVSREVEKRLRRIIRELERVSKEVLDRLREIIEKLDRDAT

SEQ ID NO: 16953 - protein, 56 aa, Artificial Sequence
  Synthetic
SVEDDVRRKLKEIEDEHRKVVKDARDELEKSHRRLRKVIEDVKRKLDRVLEELERS

SEQ ID NO: 16954 - protein, 56 aa, Artificial Sequence
  Synthetic
EKDLEEVIRRIRKKVEDSKRDLERLLEKSKRDVEEVMKDLKRRIEELEKLVRDETT

SEQ ID NO: 16955 - protein, 59 aa, Artificial Sequence
  Synthetic
SLKDELEKLLKELKEHVDRSEKKARENLKRLEEHVRKSKEELEDRLRRIEEKVKRLTES

SEQ ID NO: 16956 - protein, 59 aa, Artificial Sequence
  Synthetic
EEMVERAIRKLEDIHRRHREVVERVEREHRRIKEEHEKVVREAEETLKRIIEDLRRSAD

SEQ ID NO: 16957 - protein, 59 aa, Artificial Sequence
  Synthetic
KLEEEARELLRRLEEHVRKSKKEAEDNLRRLEKHVEDSKRRLKELLDRLRKTVEDLKRA

SEQ ID NO: 16958 - protein, 59 aa, Artificial Sequence
  Synthetic
EDVVRRAADALRRVHEAHKRMVEEVKRRHDEIHKRHEKVVRDAERALREVLKRLEEAAR

SEQ ID NO: 16959 - protein, 56 aa, Artificial Sequence
  Synthetic
SLRETADKRLRDVNRDLKRVIEELRERLKESNKKLEDLIRELRERAERILDDLRRS

SEQ ID NO: 16960 - protein, 60 aa, Artificial Sequence
  Synthetic
EEDLARRLEEIVKESKEIVDRARRRLEEIVERSEDRVRRVEERIKELVKRLEDIVRREKT

SEQ ID NO: 16961 - protein, 60 aa, Artificial Sequence
  Synthetic
KEIEEVLRRLEELIRRVREELRKNNEDIEREADKLRKELKRVNDELEKKIKDVKDRARRD

SEQ ID NO: 16962 - protein, 59 aa, Artificial Sequence
  Synthetic
KEVLDELRRVVEEVTREIREVLETSRELVRRIVETVKEVLRSHDEKIKKVEEELDRDRQ

SEQ ID NO: 16963 - protein, 57 aa, Artificial Sequence
  Synthetic
DVDEKVRELLRKIEEDLRRSVKELRELAKRIEEDLRRISKKSKDLLKKIKDDVKRAG

SEQ ID NO: 16964 - protein, 56 aa, Artificial Sequence
  Synthetic
EEDLKRVIEELKKEVEELHRRNEKIIRELEDKVRRVREDNERVIEELARDVERAER

SEQ ID NO: 16965 - protein, 59 aa, Artificial Sequence
  Synthetic
SLREEAEKIIRDLEDHVRRDEERVKEMVDRSRKLVKELEKRLRDLIREITRRVDKLRKD

SEQ ID NO: 16966 - protein, 59 aa, Artificial Sequence
  Synthetic
EKVLRKAEELLKRIIAELKKIHEELRRLSKESKERLERILDEARKMLEEVKKRLEDIEK

SEQ ID NO: 16967 - protein, 59 aa, Artificial Sequence
  Synthetic
SLEEKLEKLLKELRDHVRRDKKEVREALERLKDHVRKDREKLERAIAEIKKAVEKLKRD

SEQ ID NO: 16968 - protein, 59 aa, Artificial Sequence
  Synthetic
EKVLRKLEKAAREVAEAVKKVHEELKRALEEIRRELEDINRKLKEAADEVRKKLRDIAE

SEQ ID NO: 16969 - protein, 60 aa, Artificial Sequence
  Synthetic
SLEEELREVIKRLRDHVRRDKERAKEAIKRAEDHVRRDEEAVEEVIKELKRLVDELRKAK

SEQ ID NO: 16970 - protein, 59 aa, Artificial Sequence
  Synthetic
EDVLRRATKALEDIRRELEKINEELKRAAERIEKRLKEIHDRLKKALDDVRRELEETRR

SEQ ID NO: 16971 - protein, 59 aa, Artificial Sequence
  Synthetic
SLKEKLEREIERLRKHVEDDERRLREVIRRLEEHVKRDEDRLKKELDRLREEVERLRRA

SEQ ID NO: 16972 - protein, 59 aa, Artificial Sequence
  Synthetic
EEVLKEAEDLLRDVTRALEEVNRRARKLLKEIKEKLDEIHKRLNKMLEEVKRRLDEIRR

SEQ ID NO: 16973 - protein, 56 aa, Artificial Sequence
  Synthetic
SRAEEMIKDVRRIVEEVRRENKRVLEEIEEIIKRSKEEWEKILKELRDIIEEVERR

SEQ ID NO: 16974 - protein, 59 aa, Artificial Sequence
  Synthetic
EELLRRIKEVVDRARDTLRRLDEELKRIVEAVHDTDDKVKKELEKIVREVEEIARRRSK

SEQ ID NO: 16975 - protein, 57 aa, Artificial Sequence
  Synthetic
SEAERVVRENEENLERIKREVERDLRRNEEVLEDLRRKVKKVLDEIRETLRRLREAK

SEQ ID NO: 16976 - protein, 59 aa, Artificial Sequence
  Synthetic
EEAVRKLDDLDRRLEEIVRRASEALKRSLEEIERILRKAEEDLRRLLKRLEEIIREVER

SEQ ID NO: 16977 - protein, 60 aa, Artificial Sequence
  Synthetic
SVEDTLREMLKRLEEIVRRAEETLKRLNEEIERVVREAARRLDKLNKELRDIVRDIKRRK

SEQ ID NO: 16978 - protein, 56 aa, Artificial Sequence
  Synthetic
KDDLKRRLEEILKELKRIVDEAEERHREIIKRLRDIVREATEKSREVLKRLEDKAK

SEQ ID NO: 16979 - protein, 60 aa, Artificial Sequence
  Synthetic
KVREKLERALRRSTTSSRDIERRLKELLDTNREIVDRIVKRLKEMLDRLREEIRRIEERR

SEQ ID NO: 16980 - protein, 59 aa, Artificial Sequence
  Synthetic
DELVKRLEDDLRRWEKESKEIVDRVKEEIDRVNRESKETLKELEKEAKRVLDELERDER

SEQ ID NO: 16981 - protein, 60 aa, Artificial Sequence
  Synthetic
DVERTLDEMLKRSEDVTDEVREELKRALESNNKLIKEIVDTADKVLKDIEDTVRKIIEKK

SEQ ID NO: 16982 - protein, 59 aa, Artificial Sequence
  Synthetic
EKLVKEVEDRARKWLKDLRDKIERLREELEKVNRDTERILEKVERDLRRLLEEVRKRDR

SEQ ID NO: 16983 - protein, 56 aa, Artificial Sequence
  Synthetic
DEVEKVLREIEEIIKELKKEVDKDLEELKRTIERLKKKADEVVKRNEEVIRTLREG

SEQ ID NO: 16984 - protein, 59 aa, Artificial Sequence
  Synthetic
KEAADKLRELLKRLEEVVRRWKEAIEDINRKLEKVVRDIERLLRDLDRKAREVLERLRK

SEQ ID NO: 16985 - protein, 56 aa, Artificial Sequence
  Synthetic
SSVEKVLRELDDLIRRNRDLVEEDRKELKRTSDENRERVERIVRKNEKAIRDLRRN

SEQ ID NO: 16986 - protein, 59 aa, Artificial Sequence
  Synthetic
KKAADDLKRVLDKLRKSHREWNELIKKANKENTEILREAEERLRELDRRLRKVLEDLRR

SEQ ID NO: 16987 - protein, 60 aa, Artificial Sequence
  Synthetic
SEVERVLKELKELLDRLRELVEEILRRLEKIIKETKREIEESLRTLEEIIRRLEELAERV

SEQ ID NO: 16988 - protein, 58 aa, Artificial Sequence
  Synthetic
DADRALRKVLEDIKEIVKKAKEDLERVYKKHKKLVDEVKKAHEDVLKKAREVLEEIRR

SEQ ID NO: 16989 - protein, 60 aa, Artificial Sequence
  Synthetic
DEVEDVLRKIKEIIKRTEDKVRESLKTLKEIIRRTKEEVKKILKEIKELIERVEREARRV

SEQ ID NO: 16990 - protein, 59 aa, Artificial Sequence
  Synthetic
ERAETKLRELYERHRKVIKEVRERHKEVHKRHRDVLEEIRRRLEKLLKDLEDVIREIER

SEQ ID NO: 16991 - protein, 56 aa, Artificial Sequence
  Synthetic
DEEKDVVRRLKRNVEENTKNVERMVRELERNIRENTENAKEVITRLKKIIDELRRR

SEQ ID NO: 16992 - protein, 55 aa, Artificial Sequence
  Synthetic
EDVKRVRKLARESLERVRRLHREVLEKLKKSHDDVKRLHEEIDERAKRVVEEREK

SEQ ID NO: 16993 - protein, 56 aa, Artificial Sequence
  Synthetic
DAEELLKEIERELKRSIEEARRLLEEVEKRLRKSKRDVEKLLKEVREKLEKVVREI

SEQ ID NO: 16994 - protein, 59 aa, Artificial Sequence
  Synthetic
RDVVRRLVEEARKLVEENTRENRDMIEKLRRLVKRHSEEVEEIIRRLDKLIDDVRREAE

SEQ ID NO: 16995 - protein, 59 aa, Artificial Sequence
  Synthetic
SLEELLREVERRLRELNKKLEDMIREVEERLRKVIRETEKLIEDVKRELEKILEKARER

SEQ ID NO: 16996 - protein, 56 aa, Artificial Sequence
  Synthetic
EKELEKEVRDDLRRTDEDIRRLLDEARKDVERHKEELKKLLEDAKRLLERVERTIR

SEQ ID NO: 16997 - protein, 57 aa, Artificial Sequence
  Synthetic
RELEEVVKKVREEVKEHTEKVKRLVEEAEELNRRYEEEVKKLVTTAKRLNDEARKRN

SEQ ID NO: 16998 - protein, 56 aa, Artificial Sequence
  Synthetic
KELLDEVAKLVEESLRRLDRLLEEIKRTSDELIEKNERLNRELNKTSDKVVEDMRR

SEQ ID NO: 16999 - protein, 60 aa, Artificial Sequence
  Synthetic
SLEDLIREVEDRNRKSVEEVERLLEEVRRKLDESRKRLEELLKRVEEKLERVIEEAKRRL

SEQ ID NO: 17000 - protein, 59 aa, Artificial Sequence
  Synthetic
EKVVEELAREMKKSVEEHTREVRRMVAELEKLVKRHTEEVERAVREAEKLVETLREELR

SEQ ID NO: 17001 - protein, 60 aa, Artificial Sequence
  Synthetic
SLEDLIREVEKRNKESVDTARRLLDEVRKKLKDSIDRSRKLLEEVRRKLEEVIKDAKRKL

SEQ ID NO: 17002 - protein, 59 aa, Artificial Sequence
  Synthetic
ERVVEEIMRRLEKSVERHTEEVKRVVREAEELVKDNTRKVEELVRRAEKLVEDLERRTR

SEQ ID NO: 17003 - protein, 60 aa, Artificial Sequence
  Synthetic
SLEELIREVEERLRKSVDDSRKLLEEVKRKLEDSKREVDRLIEEVKRELERVIEDVTRKL

SEQ ID NO: 17004 - protein, 59 aa, Artificial Sequence
  Synthetic
EKVVKELADEMRKLVRTNTEIVKDVVKKLDELVERNTRTNRDVVRRARELVEELERRER

SEQ ID NO: 17005 - protein, 57 aa, Artificial Sequence
  Synthetic
RELERVVEEARRLVEEHTEEIERSADKARKLNEEHSRRVDEIFERLERLIREAEKKN

SEQ ID NO: 17006 - protein, 56 aa, Artificial Sequence
  Synthetic
RELLEEIRKLVEESVERVKRLNEDVNRTSKESVKRLEDLVDEIRKRVEEVVRRLKK

SEQ ID NO: 17007 - protein, 56 aa, Artificial Sequence
  Synthetic
SELERVAEEAERIVREAEEKIKKSVTELKELVKRHSERVKRIFKELEELLRRLREK

SEQ ID NO: 17008 - protein, 56 aa, Artificial Sequence
  Synthetic
EDLLREVRKKVEEVVKKIKRLNEEVNRDVKRSAEELKRLIDDIRRILKKVIDDLKT

SEQ ID NO: 17009 - protein, 56 aa, Artificial Sequence
  Synthetic
DEMEEVVKRAEEIVKEARERIEESFRRLREENKEALERLKRIAEEMRRLLKEVLER

SEQ ID NO: 17010 - protein, 56 aa, Artificial Sequence
  Synthetic
EELLRRVEKEVRRVEEEIRRLNKEVNETSDRVEREAEKLVRELEEAVRKVVEDLER

SEQ ID NO: 17011 - protein, 59 aa, Artificial Sequence
  Synthetic
DLEEVIKEARKRLEDSHRRLEKLIREVEKEHEDSHRKLRELVERVKKKHKEVEEKIKRN

SEQ ID NO: 17012 - protein, 56 aa, Artificial Sequence
  Synthetic
VEELLKDLERMVRELNEEIERALEDAKRNVDRLDDEIRKLEERVDRNVKRLEEDIK

SEQ ID NO: 17013 - protein, 59 aa, Artificial Sequence
  Synthetic
SLEDVAREAKKRLEDLKKKITDLIREARRKHKESHDRLRELVEKIKEDLKRVLKKLEDD

SEQ ID NO: 17014 - protein, 56 aa, Artificial Sequence
  Synthetic
VREVKEKLRRTVEALDERIDKLRKELDENVRRLDKEIEDMVRKAKKVVDELREEIR

SEQ ID NO: 17015 - protein, 59 aa, Artificial Sequence
  Synthetic
DLDEVVKEVDRRLEESHERLRRLIKKVDEDHRRSHEDLKRVIDEARRLLEEVLERLRRN

SEQ ID NO: 17016 - protein, 56 aa, Artificial Sequence
  Synthetic
VEEVLKEVKKAVEKLNEDIDRLFEKARENVKRLDEDIKRLLEELRRKVKKAEDEIR

SEQ ID NO: 17017 - protein, 59 aa, Artificial Sequence
  Synthetic
DLERVVEEVKKLLRDSHEEHKKVVKEVKERLDRSHKESKRVSDEVRKKLEEVLKELEDR

SEQ ID NO: 17018 - protein, 56 aa, Artificial Sequence
  Synthetic
VEKVLRDVRRVVTELNKHIEDLKRKVTEDVERLNTEIKELKKRNDEAVRRAREEIK

SEQ ID NO: 17019 - protein, 60 aa, Artificial Sequence
  Synthetic
KEDEDLDRDVKRHIEETEKRVKEVEKRHKDEIRKVREDVKDVERRHKEKIDDVRRKLRDG

SEQ ID NO: 17020 - protein, 55 aa, Artificial Sequence
  Synthetic
EEILRKLRKRTEEIKREAERIHDRTREEIEKIKRDLDEIHKRTREVIKELEERSR

SEQ ID NO: 17021 - protein, 60 aa, Artificial Sequence
  Synthetic
KKEEDIEREIRDHIRRTREKLEKLAKELRDDIRRLREELKRIEDEIREESKRLEDILRKG

SEQ ID NO: 17022 - protein, 55 aa, Artificial Sequence
  Synthetic
EDILRRLREETEELRKEAERLLREYKRLTEELARELRELVKKLEEEVRDLERRSR

SEQ ID NO: 17023 - protein, 60 aa, Artificial Sequence
  Synthetic
SEEERIEEDIRRHIKRTRDRLDELRRRLEEDIKRLRERVEDLKRDLERNIRELRDRLRRG

SEQ ID NO: 17024 - protein, 55 aa, Artificial Sequence
  Synthetic
EEILRRMERLTRELAKDADRLLKKYRKLTEDLKRELEKILKTYRDLTEELKERSR

SEQ ID NO: 17025 - protein, 56 aa, Artificial Sequence
  Synthetic
SELDELRKRIEEAAKELKKRLEDHKRRLEEAEERFERDLERIHRRSREVVRDLKER

SEQ ID NO: 17026 - protein, 62 aa, Artificial Sequence
  Synthetic
DRILREVEDIVRKLKEILKEVRDRLRELSKRLEDRLKEVEDKLDKDVKDVEEELRRILEERK

SEQ ID NO: 17027 - protein, 61 aa, Artificial Sequence
  Synthetic
SRLEKAEEDIKRYIEEHKRRSEETLKELTDKAREITRRLDESLKTVEDTSREIKKDVEDRG

SEQ ID NO: 17028 - protein, 59 aa, Artificial Sequence
  Synthetic
EDLRRVIKRIRELLERLEREDRRIIEEIKKLLDRLKKKVEDIIERIERSLKRLEEELRR

SEQ ID NO: 17029 - protein, 60 aa, Artificial Sequence
  Synthetic
SEEELLRKLEEISRRVTRALEKLLEDHERLSREVAERLEDLLRRHKKLLEELIKLAEERV

SEQ ID NO: 17030 - protein, 56 aa, Artificial Sequence
  Synthetic
EEELDERIRRLKDKNKKNLDDLREHSKEVLERNKENLDELRKHSKKVLDEARKELK

SEQ ID NO: 17031 - protein, 59 aa, Artificial Sequence
  Synthetic
DEKERAKEEVKKLRDDAEKTDRDLEKEVEDTARELKETLERLRREVERLEEELERISRR

SEQ ID NO: 17032 - protein, 55 aa, Artificial Sequence
  Synthetic
KDLTEELKRVLDDHERTLRKIEEDLRRILEEHKKETKKITEELERILEKMRKDEE

SEQ ID NO: 17033 - protein, 56 aa, Artificial Sequence
  Synthetic
STKEELLERAKEIIKRLEELLRRNNRTLREILKDLKKRLEESNREIKRLIDEVTRN

SEQ ID NO: 17034 - protein, 56 aa, Artificial Sequence
  Synthetic
DEDLRRELERLKEEVDRAHKESEEIVKKLEKRIRDAIRRSKKRVDELEKELREAEK

SEQ ID NO: 17035 - protein, 56 aa, Artificial Sequence
  Synthetic
SEKEEVDETLRRLEEEHERVVRDAKRRLEEDHEKLRRVIRDSDRINDEINKKAEED

SEQ ID NO: 17036 - protein, 56 aa, Artificial Sequence
  Synthetic
AEELKRILDETRERIRESMEEIKRKLEESRRESEDIRRKLKEDNDRLKKELDDRAK

SEQ ID NO: 17037 - protein, 59 aa, Artificial Sequence
  Synthetic
SSEEEIRETVKRLKEIVKKHKKDVDEIAEELRRIVEELRRRNEEEIKKIRKILRELEEK

SEQ ID NO: 17038 - protein, 59 aa, Artificial Sequence
  Synthetic
EKLVRELERIVEEIKEELEKSDRELEKIIREIAKRLEEIHEETERAVREVKKRLDEVAK

SEQ ID NO: 17039 - protein, 56 aa, Artificial Sequence
  Synthetic
SEEEKLLERLERTVERLEREARRLLEKSKEKLKRLEDSSRELLDKLRKEVERLRRE

SEQ ID NO: 17040 - protein, 59 aa, Artificial Sequence
  Synthetic
EDFLRELEKLLEEIKRKIEEARERLERSNKELEDVIRDSERRLRKLLKEIEEVIRRKAT

SEQ ID NO: 17041 - protein, 56 aa, Artificial Sequence
  Synthetic
SEIERLLERLKKALEEIKRSSERLIRKLEEVLRDLEREVRKLLEDSRRTLERIRKE

SEQ ID NO: 17042 - protein, 59 aa, Artificial Sequence
  Synthetic
RDAVEELERLLKEIEKTIEESRRRLEELLERIERLIRKVIEELRRSNEELERVIREKSK

SEQ ID NO: 17043 - protein, 59 aa, Artificial Sequence
  Synthetic
KVEKRLRELVERIRESHERVLREVERLVEEHRETLKRILDRIREILKRIEEDIESIRRR

SEQ ID NO: 17044 - protein, 59 aa, Artificial Sequence
  Synthetic
EEVVREELERLERNIKESRDDIRRALKELKDTNEKAKEELERKLEELDRDLKRLREEAR

SEQ ID NO: 17045 - protein, 60 aa, Artificial Sequence
  Synthetic
SEVEDELRKSRKEIEDLAREAERELEEIKRHIERSERKAKEDIDRIEREIEELDKLRKEN

SEQ ID NO: 17046 - protein, 56 aa, Artificial Sequence
  Synthetic
EKALRKSHKELEDLVREVEKKLRELLERYRKRIEEVAKKLDDLLDKLREVVDRAKK

SEQ ID NO: 17047 - protein, 59 aa, Artificial Sequence
  Synthetic
SEVERELKRIKDEIRELAREAREDLERIKEHIKRSKERVEEELRRSEEEIKEIERLARE

SEQ ID NO: 17048 - protein, 56 aa, Artificial Sequence
  Synthetic
KDDLDRLLEELERVVREVKKRLRKLLEDYKELVDRVRKKLEDSHRRLKELAERTKK

SEQ ID NO: 17049 - protein, 60 aa, Artificial Sequence
  Synthetic
DVERELDRIHREHEELLRDIEKKLREILREHEELLKRIKEELDEILERLRKLVEDVKREK

SEQ ID NO: 17050 - protein, 59 aa, Artificial Sequence
  Synthetic
EEEVRDILRRLKEEIDRSRREAEEILRRLKKEIEDTKREVDETKKDLKRTLDEIREEAK

SEQ ID NO: 17051 - protein, 59 aa, Artificial Sequence
  Synthetic
SEVEEEVERIDRNIDRLRKEVEDNIRRSEEEIKRIKEEVEKNLEDLRREIDRIRELVEA

SEQ ID NO: 17052 - protein, 60 aa, Artificial Sequence
  Synthetic
MERMKRKLKELLDKHKKLVDDAKKKHDDSNRKLERLIREATKEHKKALEDLKKLIDDSRR

SEQ ID NO: 17053 - protein, 61 aa, Artificial Sequence
  Synthetic
KDTEEAEERWKAKDKKLEDDVRENLKRLREEITRLEKEVKDNVRRIKELIDKLRRDVEREG

SEQ ID NO: 17054 - protein, 59 aa, Artificial Sequence
  Synthetic
EEAKDSLRKLKKHSDDTVRRVKEEHERVLKEAKELLDKVEKEHRRLLEELERLLREARK

SEQ ID NO: 17055 - protein, 61 aa, Artificial Sequence
  Synthetic
SEEDKERKKWERRDEELRKRVERNEREWERADKELEEEVKREVERIRREIEELRRRVEKDG

SEQ ID NO: 17056 - protein, 59 aa, Artificial Sequence
  Synthetic
DEARKELERLLEHSRKLLEDVRRSHEELVKHSKERADRIRETLKKLLDDLRKLLEDARK

SEQ ID NO: 17057 - protein, 61 aa, Artificial Sequence
  Synthetic
SDIERRKEEWKREDEKLEKRSRKNVEDWERRDEELKRRSEENVRRIKEMIERLEDRVRRDG

SEQ ID NO: 17058 - protein, 59 aa, Artificial Sequence
  Synthetic
EEARKELEKLLRNSKRLVDESERRLRELERHSRELLKRSRRELERLMKELEDLAREIRR

SEQ ID NO: 17059 - protein, 59 aa, Artificial Sequence
  Synthetic
RESEKIKEDMDRSNEKHNKEVEETLKRLEEELKRLEDEVRDAKRELDELLERLERRARD

SEQ ID NO: 17060 - protein, 59 aa, Artificial Sequence
  Synthetic
KELEDLARDVAKKNKESVDRVKKELKRVDEEVKRLLDEVKKDLDKVREDLKRVIDEIRR

SEQ ID NO: 17061 - protein, 61 aa, Artificial Sequence
  Synthetic
SEVEKVITEVEELVREYRKRLEDKRREAKKRVDEYEERLKRMEDEVRKLLEEIERRIRKDG

SEQ ID NO: 17062 - protein, 56 aa, Artificial Sequence
  Synthetic
KDALRRAEEKLKKLIKENKEINDEINERSKELNERSKEVLKKIEEDLRRLIEEVRR

SEQ ID NO: 17063 - protein, 59 aa, Artificial Sequence
  Synthetic
SREDLVREVRERLKKLLKHSAELIKRVKEELEELLRHSEENVREVKKRLDEIKEEAKKR

SEQ ID NO: 17064 - protein, 56 aa, Artificial Sequence
  Synthetic
IEDERRAVEETEERWRRKDDTVRKEVEEEKEKWRREDEKHHRDVERALRKLKRDIE

SEQ ID NO: 17065 - protein, 59 aa, Artificial Sequence
  Synthetic
DEDELVREAKDRLDKLLEHSRKNVEEAEKRLRDLLEHSKKNVEEAERLLEEIEEEARRS

SEQ ID NO: 17066 - protein, 56 aa, Artificial Sequence
  Synthetic
LEEVRKEVKKEIDDWRARDEEHHRDVKRREEEWERKDEEHHRKVEEVIERLKRELK

SEQ ID NO: 17067 - protein, 59 aa, Artificial Sequence
  Synthetic
SVEELIKEVEERLKRLKEHSEDLAREVRERHKKLIEELRRILEEVKKRHKDLTEKLEKD

SEQ ID NO: 17068 - protein, 55 aa, Artificial Sequence
  Synthetic
EEMKKRVEEEEKKWKRDDERLEKRVRENIERLRRLLERLRKRVEDNIKRLDDERR

SEQ ID NO: 17069 - protein, 59 aa, Artificial Sequence
  Synthetic
REEDLIREVERILEELLKHSKRLIDEARDSHRRLLEHSKRLVEEVERLHKELLDRAREN

SEQ ID NO: 17070 - protein, 55 aa, Artificial Sequence
  Synthetic
DRMREEVRKTEERWRDKDRELEKRVRDNERRWEDRDRKLEKRVRDNIKRLRDELE

SEQ ID NO: 17071 - protein, 59 aa, Artificial Sequence
  Synthetic
KAEELVEKVRRDLEALLEHSKTLAEKVRRDHRKLKEELKELLERVKRRLEELKKRLEDS

SEQ ID NO: 17072 - protein, 55 aa, Artificial Sequence
  Synthetic
DELRKKVDEDRRRWEEDDRRLEKRVRENLRRLEKIIKDLEDRVRREVEKIDKDRK

SEQ ID NO: 17073 - protein, 59 aa, Artificial Sequence
  Synthetic
DREKLIEEVKDRLRRLLKHSRELLKEAEDRHRELLKHSERLVRESERRLEELLRRARKS

SEQ ID NO: 17074 - protein, 55 aa, Artificial Sequence
  Synthetic
DEVRKEVKKDEDDWRKADDDLRKRVEDNVRRWEERDRELKERSERNLEKLERERK

SEQ ID NO: 17075 - protein, 59 aa, Artificial Sequence
  Synthetic
SREDLVRRVDKALRDLTRHSEELMRRSDETLKELLKHSRRLAKESEDRLKELLDEARER

SEQ ID NO: 17076 - protein, 55 aa, Artificial Sequence
  Synthetic
ERLEEKVRREEEEWKKKDEELKKRSEKNVDEWRKRDDKLRRDSKRNLDKLREEIR

SEQ ID NO: 17077 - protein, 55 aa, Artificial Sequence
  Synthetic
SLVDEIRERVRRLDEDVRRLIEEIEKRIREIDKRAEDLIRKIEDDSRRTLEEVAK

SEQ ID NO: 17078 - protein, 58 aa, Artificial Sequence
  Synthetic
EELEKVVEENERSLRELVKTLEDVLRKNDKTVKELEKRLREVLDRTRRFMEELIRRAR

SEQ ID NO: 17079 - protein, 55 aa, Artificial Sequence
  Synthetic
SLKDKIREDSERTLKTVERLLREIEKEIRKLDRDIERLIEEIRRRIEKLDKDIER

SEQ ID NO: 17080 - protein, 58 aa, Artificial Sequence
  Synthetic
EELEKVLKDTRDEAERLKEEVRRVLEDNDRTAKELRKTLEEVLKRNEESARELKKRIT

SEQ ID NO: 17081 - protein, 56 aa, Artificial Sequence
  Synthetic
DEERRVEEELREVDKRLKKLLEESKRKLDEVIRRVREVVKKLKKRLDDVNRLVARD

SEQ ID NO: 17082 - protein, 55 aa, Artificial Sequence
  Synthetic
EKILRTVEKLVRDIERELRETNKRVREDVEKIIEDLKRILEENDKRADDWRRADK

SEQ ID NO: 17083 - protein, 56 aa, Artificial Sequence
  Synthetic
DESEEVARELEKVDRDVDKLVKDSRKELEDSNREVEELLRRSTERLKEVNTLVARD

SEQ ID NO: 17084 - protein, 55 aa, Artificial Sequence
  Synthetic
EKLVREVERRVEDIKRKAEKTLDDNRKLIEEWVRRLEKSLEDNRRLAKKWKDEDK

SEQ ID NO: 17085 - protein, 57 aa, Artificial Sequence
  Synthetic
SELDELKKEVDDVAREVRRHNKKLEEEVEREVRRMRRHNEENVKRVEESAKEARKDV

SEQ ID NO: 17086 - protein, 56 aa, Artificial Sequence
  Synthetic
LREVKKLVEEVTRRLERINKELERLIREVRKRMERVNDELHKRNRDVERKLREVVR

SEQ ID NO: 17087 - protein, 57 aa, Artificial Sequence
  Synthetic
SELEALEEDVKRVVKEIKDHNEKLIRELEETIRRIDRHNDENIRRTEEEIKRVLDKK

SEQ ID NO: 17088 - protein, 56 aa, Artificial Sequence
  Synthetic
EEDLRRLLEKLKEDLRKVNEDLERLLREAKRRLERVNEKLHELSRRIREKLEEVDR

SEQ ID NO: 17089 - protein, 57 aa, Artificial Sequence
  Synthetic
SELEKLVEKIKERVERARRHNERLREDVERVLTESDKENKDLIDDARRAVKEVLDRK

SEQ ID NO: 17090 - protein, 56 aa, Artificial Sequence
  Synthetic
EEELDRLIREIIKELEDVNRTLRKLLEEIKRRSKDVNRDLRRLLEEIKEKLRRKSK

SEQ ID NO: 17091 - protein, 57 aa, Artificial Sequence
  Synthetic
SEIDELKKDVERRVREVEETNRRLEKEVRERLERSRKHLKELIEDARREVERVEREV

SEQ ID NO: 17092 - protein, 60 aa, Artificial Sequence
  Synthetic
KKKVLDELKKVIKEVEDRLRKIDEELKKVIDEVRKELEKINRDLERVIREVKKRAEEVRR

SEQ ID NO: 17093 - protein, 57 aa, Artificial Sequence
  Synthetic
REIEELAKTVRKEVDDSRKHLKELREDAKRTLDEVKRETKKLEEDVRREVERVKREV

SEQ ID NO: 17094 - protein, 60 aa, Artificial Sequence
  Synthetic
KEKVLRELKKVIDEVRKLLEDINRELEEAIRDVKRKNEDTLRELRKVIKEVEKRLKDVTR

SEQ ID NO: 17095 - protein, 58 aa, Artificial Sequence
  Synthetic
KEVEDVVRELKKSLEENEKRVRDIERELREVVKKIAKRVEETREEVERMLEEIRRRSG

SEQ ID NO: 17096 - protein, 56 aa, Artificial Sequence
  Synthetic
IKKVVDEARKVLKEVHENTERIVDEARKLLKRMEEKNRKTEEDIRRVADEVREKAR

SEQ ID NO: 17097 - protein, 58 aa, Artificial Sequence
  Synthetic
SKVDKVREEVTRSLEDNKRKVEEIEREARESLERNRKKVEDSIREARKVVEEIERKKG

SEQ ID NO: 17098 - protein, 56 aa, Artificial Sequence
  Synthetic
IDTVTRRIREVMKKVHDNTRRIAEELRRLMKRVHDNTERSHEELKRLLEEVKRKAD

SEQ ID NO: 17099 - protein, 58 aa, Artificial Sequence
  Synthetic
REVEEVVKELKKSLDDNRDEVRKIIEEVTRLNKRNEEDVKRVTDEAEEVVKRIVEKKG

SEQ ID NO: 17100 - protein, 56 aa, Artificial Sequence
  Synthetic
IRKVVEEARRLLERVHRNTKRVADEIRKLDKRSSELLDKILKDLRKLLEDVEREAR

SEQ ID NO: 17101 - protein, 63 aa, Artificial Sequence
  Synthetic
DEKDEVRRRVDRELEDVHRETKKSSDDDKRLLEDVHRKLKESEKEVRRIADEVRKKLEDVRRR

SEQ ID NO: 17102 - protein, 55 aa, Artificial Sequence
  Synthetic
REVLEKIKRSLDENKERVEKSKKDSDDSLRENKDRVDKTDEEAKEMIKDLKRKTD

SEQ ID NO: 17103 - protein, 63 aa, Artificial Sequence
  Synthetic
DEKEKVTREVRRILEEVDKRLEESRERVERIAEEVHRRTEESHRRDEEVVERVKEELKEARRD

SEQ ID NO: 17104 - protein, 55 aa, Artificial Sequence
  Synthetic
REVLEELKRELRRLEEDVRRTDRKLEESLKDNERKVRRSKEESDRLLRELEERTR

SEQ ID NO: 17105 - protein, 63 aa, Artificial Sequence
  Synthetic
KEVEDVRRRVEKILEEVHKKTREVTERVRRILEEVHRKTEESHRRDEEVMRRVRDELEKARRR

SEQ ID NO: 17106 - protein, 55 aa, Artificial Sequence
  Synthetic
REVIEKVKESLRENERRARKVEKEIRDSLERNRERVEDSKRTSKKLIEDLREAVR

SEQ ID NO: 17107 - protein, 63 aa, Artificial Sequence
  Synthetic
DEEKELVRELRDILKKVHKETKESSDTDREVLKRVHEDTERSHRDDERVVEEVKKELDKIRDR

SEQ ID NO: 17108 - protein, 55 aa, Artificial Sequence
  Synthetic
REVEDEVRRSLEDNRRRVEESKRRSDESLRRNKRKVERSKEESDRLLKELEDEVR

SEQ ID NO: 17109 - protein, 57 aa, Artificial Sequence
  Synthetic
REVEEALKRNEAVVEESREAVERALRENETMVRESEKEAKRVKDENRKSIEELKRSN

SEQ ID NO: 17110 - protein, 59 aa, Artificial Sequence
  Synthetic
EEVLERVVRKLKELDDKSREDLEKVKKELRDVDTRSEELLREVEKRLREVDDRLRREEE

SEQ ID NO: 17111 - protein, 57 aa, Artificial Sequence
  Synthetic
SEVEEVEKENKKMVEESERELEKLERENDKLLKESEDEARKVEEELKRVVEELDRSN

SEQ ID NO: 17112 - protein, 59 aa, Artificial Sequence
  Synthetic
EEVLREVVKDLRRVDKESKERLKRMADKLRDVDRELKEKLKRALEDLRRIVTELRERAR

SEQ ID NO: 17113 - protein, 60 aa, Artificial Sequence
  Synthetic
DEVETVTRELEDTNRDIEKKVEEVERELRKTDREIREKVKRVEEELTRSDRELAEIVKKK

SEQ ID NO: 17114 - protein, 59 aa, Artificial Sequence
  Synthetic
GEDVKRIVEKARKINEDVRREIEKITEEVRRINEEVDDRIRRIAEEARRINEKVKRRLT

SEQ ID NO: 17115 - protein, 60 aa, Artificial Sequence
  Synthetic
KEVDDVAEELRRTNKEIKDRVKDVLRELEELLTDIEKTVRDVERELRESDERLEREVRRK

SEQ ID NO: 17116 - protein, 59 aa, Artificial Sequence
  Synthetic
GEEVRRIVEKARKINTEVKKKIEEIEKTVRKILKEVRKIIKDIRDEARRINEEVRKKLE

SEQ ID NO: 17117 - protein, 56 aa, Artificial Sequence
  Synthetic
KEVEDIVRELEEEVEKIRDHSRRVSEELDKSVKDNKRRVDEVKKTLEKSVRDIRRK

SEQ ID NO: 17118 - protein, 58 aa, Artificial Sequence
  Synthetic
EVLKDVARRAREMLEEVRRKDRENTERARRLLEEVHRRTEEVERRAREVLKKADEDVK

SEQ ID NO: 17119 - protein, 60 aa, Artificial Sequence
  Synthetic
SELDELRKRVRDLDERLKESDDTLRKLVKELIERVKKSDTELERLVERVIEEIERVLRDR

SEQ ID NO: 17120 - protein, 60 aa, Artificial Sequence
  Synthetic
VKDRLRELEEELRKRMKESDERNRDLRRRLEEMIKDSKRTNDELKKRVEKVAREAEEKLR

SEQ ID NO: 17121 - protein, 60 aa, Artificial Sequence
  Synthetic
DELERLEEEVEEVRRRLEKSDDDLRKLVDEVERRLRESDKRLHDLSEEVIRRIEDVLRKN

SEQ ID NO: 17122 - protein, 60 aa, Artificial Sequence
  Synthetic
VKDELRKLKEKIKKVADESRRRNEELRRKVDKVIKDSRETNKRNTEEVRKVAKDVDDTVK

SEQ ID NO: 17123 - protein, 60 aa, Artificial Sequence
  Synthetic
SEEERIAKEAEDLVRRVKENNARTIKEAREVARKVEAETKKIHDDARKLVEDVKRKVERR

SEQ ID NO: 17124 - protein, 55 aa, Artificial Sequence
  Synthetic
RELKERLERVIKEIEETIRRSARELDEVNRRNEKMVKENEDELRKVIEEIERRIR

SEQ ID NO: 17125 - protein, 58 aa, Artificial Sequence
  Synthetic
DEEEEIKKELRRVAEDVKRETKRIHEEIRRVLKEVKERLKRVHDELRRVAREVKEKLK

SEQ ID NO: 17126 - protein, 55 aa, Artificial Sequence
  Synthetic
RELTEEAKKLIKENEEEIERNEREARKVIEELERVVRTNKEDVKRVEKEIEDATR

SEQ ID NO: 17127 - protein, 58 aa, Artificial Sequence
  Synthetic
KEVEEIAKEAEDVLRRLDETVKEIADEAREVLRRLNESSKRIEEEARKAIKELRDRAR

SEQ ID NO: 17128 - protein, 59 aa, Artificial Sequence
  Synthetic
KDELRKILKEVRDVLEEVKRRNEDILRRLRKIAEEVKRRNDKIREELERVLKEAEDRLR

SEQ ID NO: 17129 - protein, 55 aa, Artificial Sequence
  Synthetic
SRLEKIKDDVKRLDDDSRRTLEEVHRRNKETARRVERLLEEAHRLNKKTVDEARS

SEQ ID NO: 17130 - protein, 58 aa, Artificial Sequence
  Synthetic
DEIRKIKTDVKEMVKKNREDVKRNNEDVKRVEDKLRKELKKNDDDVRRVLEELERRLR

SEQ ID NO: 17131 - protein, 60 aa, Artificial Sequence
  Synthetic
SEIEEVTRRLEELVKTVREVLREAHERTRRLVEKVRKLIEDVIRTNRKIKERVRELLERV

SEQ ID NO: 17132 - protein, 58 aa, Artificial Sequence
  Synthetic
DEIRKLRRRVEEVVRELEEELEKDRREVEKVIEELEREVDRSNEETRRVVKRLREEVE

SEQ ID NO: 17133 - protein, 60 aa, Artificial Sequence
  Synthetic
REKEEVRRKLREAERRVEEIDRRLEKLIRDVKRRVEEADRESEETSDRVRKEVERVDRRG

SEQ ID NO: 17134 - protein, 55 aa, Artificial Sequence
  Synthetic
EEVKERLKKVLEDNRRSIDELRRRIEEVLKENKRTVEEDKKRLEKVLEDVERRAR

SEQ ID NO: 17135 - protein, 56 aa, Artificial Sequence
  Synthetic
SDTEEVEKLTEEIVREVKRLDEEVKELIKEIRKESRRTLEEVRRLIEEVRDRVEKI

SEQ ID NO: 17136 - protein, 59 aa, Artificial Sequence
  Synthetic
SKDLERLRRELEEVLKENADSIRKLETELRDVLRRTREEAEKLKEELKDVLRRVEEKAK

SEQ ID NO: 17137 - protein, 60 aa, Artificial Sequence
  Synthetic
DEERKIREEAKRADDEIRRLLEENKRALDESNKRAEELVKRLADEVREALKRIEDLLRER

SEQ ID NO: 17138 - protein, 56 aa, Artificial Sequence
  Synthetic
VKKVVERLRRLIKEVKKRLEKIHEDSRRMVEESEKLLKEIVRKLRELIKEVEDKVK

SEQ ID NO: 17139 - protein, 60 aa, Artificial Sequence
  Synthetic
DEKEDLKRTAEESDREAKKLLDENRKRLEESNKKAEDLVRRNEETLRKVDTDIKDLLRKR

SEQ ID NO: 17140 - protein, 56 aa, Artificial Sequence
  Synthetic
VKKVLDELRRLVEESKELLKRIHDESEKMVEDSERLLEEVHRRSREVVERVREKIR

SEQ ID NO: 17141 - protein, 60 aa, Artificial Sequence
  Synthetic
SEKDRLSKRAAESDEELERLVRRNAEELDRSNKEIADLLKESKDTLKRAEDEIRRLLAER

SEQ ID NO: 17142 - protein, 56 aa, Artificial Sequence
  Synthetic
VEKVLKELEDVVKKSKELLERIHKESKEMVERSKRNNEKSLEDVRRLIERVLEKLK

SEQ ID NO: 17143 - protein, 60 aa, Artificial Sequence
  Synthetic
DEKRRLKEEAKKSDDELRKLVKDSADRLEDATRRIEELLRENAKRLEEAEKRIREELDKR

SEQ ID NO: 17144 - protein, 56 aa, Artificial Sequence
  Synthetic
VEEVLRRLKDLVERSKENNKRSLEEVERLIKEVEERLKRIHDESEKVVRTVEERLK

SEQ ID NO: 17145 - protein, 60 aa, Artificial Sequence
  Synthetic
REAEEIKKRLERVREEVEKELERIHRETDKIAKDVKRELDEIDKESKKVAEEIKKVAEEI

SEQ ID NO: 17146 - protein, 57 aa, Artificial Sequence
  Synthetic
KVDELKRRVEEVKRDLERKVRENNETIKKVKEDLRREVERNHKTIEDIKRELDERVR

SEQ ID NO: 17147 - protein, 60 aa, Artificial Sequence
  Synthetic
SEAEELLDRIRRVAEEVKRRLEEIHRTTRDIVRRIEELLKEIHERTREIVERIKRVLEKI

SEQ ID NO: 17148 - protein, 58 aa, Artificial Sequence
  Synthetic
DKVKRLEEEIRKIKRELEKIVRDNNEDIKRAKERLRKINKRNHDEIKKVKDELDETVR

SEQ ID NO: 17149 - protein, 60 aa, Artificial Sequence
  Synthetic
SEAEDLRRRIEEVARRVAEKLKKINRDTERIVRDVKKKLEEIHKRTEEVAEEVKEVLRRI

SEQ ID NO: 17150 - protein, 58 aa, Artificial Sequence
  Synthetic
DEVEELRKTIEDIRRRLEEEVRRNHDEIRKAEEELRELNRRNHERIKEIKEELDREVT

SEQ ID NO: 17151 - protein, 60 aa, Artificial Sequence
  Synthetic
SEVEKIDKRAKEVEKELEESNRRNRERIKEADERLRDLLRRNKEEIDRARKRLDEIVRRD

SEQ ID NO: 17152 - protein, 59 aa, Artificial Sequence
  Synthetic
KKRLKEVERRMEEIVKTVKKRSEDSHRESDEIVKRVLERLRKVHEETKEIVKRVEDRLR

SEQ ID NO: 17153 - protein, 60 aa, Artificial Sequence
  Synthetic
EEAERIDKKLEDEVREVERELEDVHRKVKEILEDVKRKHKKVHDELKKVIDEVKRKLEER

SEQ ID NO: 17154 - protein, 55 aa, Artificial Sequence
  Synthetic
KELEEKVRRIVRKLERRVEKNKDDTRRAVEEAEKLNEDNKRTSEKVEEDLRRTTT

SEQ ID NO: 17155 - protein, 60 aa, Artificial Sequence
  Synthetic
SEAEEIVRELRKAVEDVAREHKRIHEEVRKAAEDVKRKLKEILDRLERVVEEVARALEER

SEQ ID NO: 17156 - protein, 55 aa, Artificial Sequence
  Synthetic
DELREEAKEVVRDVRRLNEENRKATEDILRELKEIVERLERRAREVVKELKERAR

SEQ ID NO: 17157 - protein, 60 aa, Artificial Sequence
  Synthetic
DEREEIRRRLREDVKRVKRRLEEIHDEVRRLLEEVDRRLRKVHKELKEEVTEVEKRLRER

SEQ ID NO: 17158 - protein, 55 aa, Artificial Sequence
  Synthetic
RELKKEIDDVRKELEETVERNKRETERALRKAKEDLDRNREEVKRVVDELEKRTR

SEQ ID NO: 17159 - protein, 60 aa, Artificial Sequence
  Synthetic
SEKDEIRDELEKILRRVEELNRRIRKKLEEIRKEVERLLREIHEKLEEVVKEVEEKLRER

SEQ ID NO: 17160 - protein, 55 aa, Artificial Sequence
  Synthetic
EELKRRVEEVLKRARESLRELEEDVRRVLEEARKELERNRERVERVLRRLEETVR

SEQ ID NO: 17161 - protein, 59 aa, Artificial Sequence
  Synthetic
DEVEDLERRLKEVVDRSRRLDEELKRRDKKSVEDVRRKLEEVRKKLEDVARKLADLLRQ

SEQ ID NO: 17162 - protein, 55 aa, Artificial Sequence
  Synthetic
EKLERDVARAREENDRTLKEISKHSEKVLREVADMARKLRKEVKRIEDEIRERAR

SEQ ID NO: 17163 - protein, 60 aa, Artificial Sequence
  Synthetic
KLVEEVKREIEELVRRLEEVLDRVRRENERLAEELKKVVKDVEDNNERIARTVTELLKKV

SEQ ID NO: 17164 - protein, 59 aa, Artificial Sequence
  Synthetic
KEKVDELKRDVDRAEEKVRELIERIKRRSEEVKKRAEELLKKLEDDSRRVKKKLDDDAR

SEQ ID NO: 17165 - protein, 60 aa, Artificial Sequence
  Synthetic
SEVDEVRKEIKRLADEAREVVKEVRKNNEKIADDSRKLNERSIRESKKVTDTVRELLKRV

SEQ ID NO: 17166 - protein, 59 aa, Artificial Sequence
  Synthetic
EERVKELKERVDEVSKELRDLLKKLRDDSERVVEENEKLLRELKERSDRATKELDDASK

SEQ ID NO: 17167 - protein, 60 aa, Artificial Sequence
  Synthetic
KKAEKVDKEIEDLAREVREVLKEVEKDSDRLVKEVEDVLRRVKENNEDIRRRVSELDRRV

SEQ ID NO: 17168 - protein, 59 aa, Artificial Sequence
  Synthetic
EESVERLRRKVKEIEDELRELLERLRKKSEDAKRKLRELLERIKRDSERAKRELEERDK

SEQ ID NO: 17169 - protein, 59 aa, Artificial Sequence
  Synthetic
DTAREVKRKVKEIADEVRELIRRVHEETKKTSETVKKLIKEVHDTTEKIVREVRKLADE

SEQ ID NO: 17170 - protein, 59 aa, Artificial Sequence
  Synthetic
KKLVEELKREVDRISEELKRLLERNEREVRESKKTLERDLERNHEEIERAKRELDERVR

SEQ ID NO: 17171 - protein, 60 aa, Artificial Sequence
  Synthetic
REVDEVRKRVEKVAEEVRRLIEKVHRETERTSREVEKRIRDVHRRSDEVAREVDDLSRRV

SEQ ID NO: 17172 - protein, 59 aa, Artificial Sequence
  Synthetic
KKMVRTLAERVKEISEELKRRLKRNKDEVEESSRRLRELLKRNHDEIRRIKEKLKEETR

SEQ ID NO: 17173 - protein, 60 aa, Artificial Sequence
  Synthetic
EEVDRVKRKLEEVEKRVTEISKRTEELVEEVRKEVERISKRTEEDDRRVAKEVRERLKSG

SEQ ID NO: 17174 - protein, 56 aa, Artificial Sequence
  Synthetic
AKEIKEKVDEVIERLRRSNRKLHERIREVEKKLRELNERLHRHSREVIKELEERAR

SEQ ID NO: 17175 - protein, 60 aa, Artificial Sequence
  Synthetic
KEVEDILRDLERLSEESLRRNEEIHRELEELLRRVDEKNREIHKTLEEMVRRALTELRKR

SEQ ID NO: 17176 - protein, 59 aa, Artificial Sequence
  Synthetic
EKVVREVDRRVEESRKRLEKLLRENEKRVRDARRRARKLSEENERTVREVEKRAREEVK

SEQ ID NO: 17177 - protein, 60 aa, Artificial Sequence
  Synthetic
DEVEEIKRKLDKVADESRKLDEDIRDKLRRVADEIRRLHEESRKELEDVVREIERLLRER

SEQ ID NO: 17178 - protein, 59 aa, Artificial Sequence
  Synthetic
EKVIKEVRDTVEKILRENEKSLEEVRKTVKRIEEESRELLETSRDEVRRVLEKAEETEK

SEQ ID NO: 17179 - protein, 60 aa, Artificial Sequence
  Synthetic
SVADEIRKDLKRVADEVEERLRRLLEHNKKVRDEVKERVDESKKELKEVEEEVTEKLERI

SEQ ID NO: 17180 - protein, 59 aa, Artificial Sequence
  Synthetic
EKVVREIEERIRRVIRRLDEVDKTNEKISRDAARELEESDEELRRRVKEVKDRLDEKTK

SEQ ID NO: 17181 - protein, 60 aa, Artificial Sequence
  Synthetic
DEAEKIKKELDDVAREVERRLKELLDDNRRVAEEVEKRLRDSKRELEEVTRRVRKELERI

SEQ ID NO: 17182 - protein, 59 aa, Artificial Sequence
  Synthetic
KKLVDKIRDDIRRIARRLDEMNKKNKKLSDELEERLKKSNEEHRRRVEKVKEELEKKVE

SEQ ID NO: 17183 - protein, 60 aa, Artificial Sequence
  Synthetic
SEAEEIEKELREVAKEVRELMREMLKNNKEVAEEVKRRLERSRERLEEVEETVRDLLEKI

SEQ ID NO: 17184 - protein, 59 aa, Artificial Sequence
  Synthetic
DKVVKKIEDDIREVEKEARKLNRENRELSKKLAEELDRSNDRHRREVERVERELEKAER

SEQ ID NO: 17185 - protein, 60 aa, Artificial Sequence
  Synthetic
SLQERVRDKVRKVKKDLEDLNRRHREEIERVVRELDKSNEDHEREVRRVEKELEELIRRN

SEQ ID NO: 17186 - protein, 59 aa, Artificial Sequence
  Synthetic
KKFVEDVDRALKRIADEVKRRSEESKKELDDIKKEVEERLRESKEKLKRIVDEARERLR

SEQ ID NO: 17187 - protein, 57 aa, Artificial Sequence
  Synthetic
SELEEVIKRAEDELRDDERENKRVLEKSDRDIKRWEEEVKRVLKKARDELDKLRKEG

SEQ ID NO: 17188 - protein, 59 aa, Artificial Sequence
  Synthetic
KDVVEKLREELEKVLKESRDESKRLKEELDKVNDDARKRLEDLMRKLERVLEEVRRRRK

SEQ ID NO: 17189 - protein, 56 aa, Artificial Sequence
  Synthetic
SELERVIEEIRRALEEDHERNRDVLREAKEELERDKRRNDKVLTDIRKLVKDLERK

SEQ ID NO: 17190 - protein, 59 aa, Artificial Sequence
  Synthetic
EETVRRLTEELRKVLDEVTKRSKELSDRLREVLRRSKELSKELEKELRKVIKEADDRVK

SEQ ID NO: 17191 - protein, 56 aa, Artificial Sequence
  Synthetic
SEIERVLKEARDELRKDEEKNRDLLRRAKKVIEEDHKRNRDVLRRVKEELDRLREA

SEQ ID NO: 17192 - protein, 59 aa, Artificial Sequence
  Synthetic
KDALDRLRRELEEVLRRSKEESDRLAEELKRVLREIEERSRRLAKELKEVLDTAKRDKD

SEQ ID NO: 17193 - protein, 57 aa, Artificial Sequence
  Synthetic
SELERVIRENERTIREDMKKNEDVLREWEKLTRDLEDTIRRVLKKNRESLKRLKDKG

SEQ ID NO: 17194 - protein, 56 aa, Artificial Sequence
  Synthetic
RRELVKRLRDVDERSDDTSRKLKEELERVIRRTEELIRRVMEDAKRVDDEARKKTD

SEQ ID NO: 17195 - protein, 56 aa, Artificial Sequence
  Synthetic
SKVEEVLRELERRVKEDEDENRKVVRENERTVKEDEDTNRDALRRNEESIDKLRRD

SEQ ID NO: 17196 - protein, 56 aa, Artificial Sequence
  Synthetic
VDTLKRELDEALKRSEEESRRLKEEVTRIDERSKRESDRLVEEAKRLDKEAKDRSD

SEQ ID NO: 17197 - protein, 60 aa, Artificial Sequence
  Synthetic
SELEEVLKKAAEVIKEIEKRLRKVLEDSRRLTKEDEKRNKEVLKKLKEKIDEIEKRARDK

SEQ ID NO: 17198 - protein, 59 aa, Artificial Sequence
  Synthetic
DEVLRRLDRELKEVLDRVEREVERLKEENDRMNKKSKDDSEKLERDLERVAERLERELK

SEQ ID NO: 17199 - protein, 61 aa, Artificial Sequence
  Synthetic
SEAEKVLKEAREAAKRIEDEARKVLRESRELAKKAEEDDRRALKRAKEAAEKIKRDADRKG

SEQ ID NO: 17200 - protein, 59 aa, Artificial Sequence
  Synthetic
DKAIKEAADRLKKVLEDAEKKAREAAEENKRANEEWKKKSKRAAEEAKKVLDEAKKELD

SEQ ID NO: 17201 - protein, 59 aa, Artificial Sequence
  Synthetic
SDKERIKERVKKVHKESAKHIEDVRRRNEEINKRIKEEIDDVERRNREINEDIRRLVRE

SEQ ID NO: 17202 - protein, 55 aa, Artificial Sequence
  Synthetic
ERVIEDLERLIEENKRTLTEVIKRHRELLEDWKRRLDEVLKDHERSAREIDEEAR

SEQ ID NO: 17203 - protein, 60 aa, Artificial Sequence
  Synthetic
DEKEEVRRTVEERLKRVEDRVRELEKENEDINRELKERLKKVRRENEEINERLKKLLDEN

SEQ ID NO: 17204 - protein, 55 aa, Artificial Sequence
  Synthetic
EEVIRRVEEEIKRIEKRLRDVIKKHEDSVRKIRTDMERVVRDHERLAKKWEDDAR

SEQ ID NO: 17205 - protein, 59 aa, Artificial Sequence
  Synthetic
DEAKEIEDRVRTEIRDIERKVREARERSKRSDDELKKHSEEVARELEEILRELEEALRR

SEQ ID NO: 17206 - protein, 55 aa, Artificial Sequence
  Synthetic
KSVIDEVRKAVEDIARKLKKVLEDNKREIDKDRKRNEEVLRTAREKAEKIKEDAR

SEQ ID NO: 17207 - protein, 59 aa, Artificial Sequence
  Synthetic
DEKEKIKEDVRRVIRRIEEIVKRVDRESERSDRELEKHSRDVERRLREINDRLRRLLEE

SEQ ID NO: 17208 - protein, 55 aa, Artificial Sequence
  Synthetic
ERVIEEVKRLIDRIREELERVLEKNARLAKEDEERNERVLTENRKLIEDWEREAK

SEQ ID NO: 17209 - protein, 61 aa, Artificial Sequence
  Synthetic
SKLEEVVRRVDKDARDIRRRNEEVKRRNEKSAREIEKKVKKVLEEFRRLVEEIRKRLEEEG

SEQ ID NO: 17210 - protein, 59 aa, Artificial Sequence
  Synthetic
ERVLKELEERVRKVLKDNRDTSKELEERVRRIDEELDKTLRKAKEELRKIIRELEERLR

SEQ ID NO: 17211 - protein, 61 aa, Artificial Sequence
  Synthetic
SELEKVLERVKREAERIEKKNKKVLEENKKSAEEIHRDNERVLREVKDMADKIEDELRKRG

SEQ ID NO: 17212 - protein, 59 aa, Artificial Sequence
  Synthetic
RKVLRDVERRVKKILDDNKRTSDEMKKRLDRLDETNKRTSEKLEEDVRRIIEDLERRVK

SEQ ID NO: 17213 - protein, 60 aa, Artificial Sequence
  Synthetic
SKLEEVLKKLERLAREIERRLRDVIRRNKESADRIRKRNEEVLRKVEDVAREIEDKVRRG

SEQ ID NO: 17214 - protein, 59 aa, Artificial Sequence
  Synthetic
EEALRTLDKRVEDIIKRLKEEVDRVVRDLEELDKENEKSSREVEERLKEIIRELEETLK

SEQ ID NO: 17215 - protein, 61 aa, Artificial Sequence
  Synthetic
SKLEEVLKTLRRLIEEIKKRLKKVKDDNKKSLEDIHRKNKRVLEELEKRLRDIDKKLKDKG

SEQ ID NO: 17216 - protein, 57 aa, Artificial Sequence
  Synthetic
VLKEVEERVERIIRELRRRVEELKRRVEELDRRNEKTSDDLEEELKRIDKELKDRTD

SEQ ID NO: 17217 - protein, 60 aa, Artificial Sequence
  Synthetic
SKVEDVVRRVAEVAERIRRRNEEVAEENERSLKEIHDENKEVVERARKMAKRIEDEVRRK

SEQ ID NO: 17218 - protein, 59 aa, Artificial Sequence
  Synthetic
EEVLKTVADEVREILERNEKTSEELAERVRRLDEENRRTSREVEKRVEEVIEDLKRRLK

SEQ ID NO: 17219 - protein, 61 aa, Artificial Sequence
  Synthetic
SEVDKLEEDLRRIIKEIRRLVEEVKRKSEEIDRELKRLLEEAERTLEEIDRKLEDELRKKG

SEQ ID NO: 17220 - protein, 58 aa, Artificial Sequence
  Synthetic
DKVREVKKDVEKKLKELEEELRDITRRNRESLKRLEERLKEVAKKNRKTVDELRKELD

SEQ ID NO: 17221 - protein, 61 aa, Artificial Sequence
  Synthetic
DEVDDLKRRLEKIITEDEKLVKEVKDRSEKLDREIAKLLEDARRALEKLDKELEEILRKKG

SEQ ID NO: 17222 - protein, 58 aa, Artificial Sequence
  Synthetic
DKVREVVKRVRDEADKSRRKLEEITRRNRDSLERIKRKLERVLEENDRTLRELEERAR

SEQ ID NO: 17223 - protein, 58 aa, Artificial Sequence
  Synthetic
SELEKVVEDSRRKLDAWDDESRRVAEESRRRLEEWRKRLEEVAKRVEERLRDLKRKAG

SEQ ID NO: 17224 - protein, 59 aa, Artificial Sequence
  Synthetic
EELVKKMARELDELNKDLDRLNKESKRELERLNTELAELIKEVERELRELLRKLEEDLR

SEQ ID NO: 17225 - protein, 58 aa, Artificial Sequence
  Synthetic
DSLEDVVRRVKKKLDDNRKDVERVAKESEELLKRWRDRVKKVVRDVERRAEELRRRRG

SEQ ID NO: 17226 - protein, 59 aa, Artificial Sequence
  Synthetic
EELIKTFERTLEELHKTNKKLNEEVKKRLEELNTRLAKLIEDVRKELEKVLKELEDRAR

SEQ ID NO: 17227 - protein, 58 aa, Artificial Sequence
  Synthetic
DELDEVVREVKDRLRENKEEVKRVMDESRRLLERWNEESERVAKKVEEAVRKLTKDKG

SEQ ID NO: 17228 - protein, 59 aa, Artificial Sequence
  Synthetic
EDDIRRITKRLRDLHRENEKLNRDVKKELRELNERLAKLNRDSTRELEELLRKLEEDAR

SEQ ID NO: 17229 - protein, 58 aa, Artificial Sequence
  Synthetic
SELDKVVEESKRLLEEWDRRSKDVAKKVKEMLDRSRKASKEVVKEARDELERLKRETG

SEQ ID NO: 17230 - protein, 59 aa, Artificial Sequence
  Synthetic
EKDIREIKERLKRLNETLAELNERSKKRLKRLLDEDKKLNDDSSKELKELLKELEDRTR

SEQ ID NO: 17231 - protein, 58 aa, Artificial Sequence
  Synthetic
RELEDVARRARKKLEDNKRRVEEVAEEVERRLDESRKESDKVVREVEEVLKRLKEERG

SEQ ID NO: 17232 - protein, 59 aa, Artificial Sequence
  Synthetic
EELVKRMTEELERVHRENEKLNRDVRRELEDILRKDEELNKRSKKRLKDLLDELRRRLT

SEQ ID NO: 17233 - protein, 58 aa, Artificial Sequence
  Synthetic
SELEEVVKKVRTDLDRIDEKSKRVAKEVDRVLKESEDRSKKVAREVEEVLRKLKEEAG

SEQ ID NO: 17234 - protein, 59 aa, Artificial Sequence
  Synthetic
EDLVRRAVETLERLIRELEKLNDESKRRLEEILREDKRLNKESTEELRRLLEELRKTLT

SEQ ID NO: 17235 - protein, 58 aa, Artificial Sequence
  Synthetic
SEVERVAEELKRVLKELEDLDRESEKKLKRLNEELARLIEEVRRRLEEVLRTLEELAK

SEQ ID NO: 17236 - protein, 58 aa, Artificial Sequence
  Synthetic
REVEEVIRRIDEAIKRIEKHSREVIERSRERVEDWRRKVERVIEEVERRARKLREDTR

SEQ ID NO: 17237 - protein, 58 aa, Artificial Sequence
  Synthetic
SEVEKVAEEAKRVLDELEKLDRDSAKELKDLNDELRKRDKESEDALRKITRDLDELDK

SEQ ID NO: 17238 - protein, 58 aa, Artificial Sequence
  Synthetic
KDVEKVIRDLKRELERLAKHSEEVIRTSEELLKRWEDHSRKVIEEVKERARDIKRRTK

SEQ ID NO: 17239 - protein, 57 aa, Artificial Sequence
  Synthetic
SELEKVVKEVEEALERNNRENRRVIRRSRELLKRWREEVEEVVRRLRERAKKIADDV

SEQ ID NO: 17240 - protein, 59 aa, Artificial Sequence
  Synthetic
EEEVRKLEEDLRRILEEIDRESDRLVKRIEDLNRRVAELLKRVEEELEDLARKVEEEAK

SEQ ID NO: 17241 - protein, 60 aa, Artificial Sequence
  Synthetic
SIEEIVEEIERELEKLKRKLDELIKRSEELSRRLAEKTRRSNEEIKREIDKVADDIRKTL

SEQ ID NO: 17242 - protein, 59 aa, Artificial Sequence
  Synthetic
EDTIRRVLEEAREEIKKLERDVDKVRKEVEDAHRKNSELNKTVHDEVRKIIDEIRKEVK

SEQ ID NO: 17243 - protein, 60 aa, Artificial Sequence
  Synthetic
SIEEILREIEELIKDLLRKAEELLKESEKRSKELKDEMKRSNEEIRKLIEDLRRRAKDRV

SEQ ID NO: 17244 - protein, 59 aa, Artificial Sequence
  Synthetic
EDVIRDLLRRVREDIDRLRKELEKVVRELRRIHEEVRRDLKRVHEEVRKRIEDLEEELK

SEQ ID NO: 17245 - protein, 60 aa, Artificial Sequence
  Synthetic
KEVEDVVRRVRKLIEDNERRNKEVHEEVEKRARENVERNRELLEKIRRTVEEIRRELEEL

SEQ ID NO: 17246 - protein, 56 aa, Artificial Sequence
  Synthetic
KDLLDEVRRLLERVKRRTEESNRRVKKIVDDVKRTSEEILREVEELLRRLIDDARK

SEQ ID NO: 17247 - protein, 61 aa, Artificial Sequence
  Synthetic
DEVEKVFREVKKRIDENREKNRRVHEKVEREARRNSEENRRVHEEVRKTVEDIRRELDEKR

SEQ ID NO: 17248 - protein, 56 aa, Artificial Sequence
  Synthetic
EELLRRIEKLAREVRDETRRSNEKVKEIIRRVEKESEDSNREVKRLLDELTRDARR

SEQ ID NO: 17249 - protein, 60 aa, Artificial Sequence
  Synthetic
SEVEDVVRKAREILKRNEDENRRVLEKVREDLKRLTDENDKVVEDVREMVRRIKEMLDRN

SEQ ID NO: 17250 - protein, 56 aa, Artificial Sequence
  Synthetic
EELLREVDERIKDVKRKTDEILREVRERIKRNEERTERLRREIEELARRLLEDAER

SEQ ID NO: 17251 - protein, 59 aa, Artificial Sequence
  Synthetic
DEEDLLEKIERILEEVKRRLEDVIRRVRKSNEDIERELKKAVDRSRELLRKVEEDLRRN

SEQ ID NO: 17252 - protein, 55 aa, Artificial Sequence
  Synthetic
RDVFERLERIARRLTEEIEKALRDSDKLNEELKRKVEEVLRRSEESIRTVLEELR

SEQ ID NO: 17253 - protein, 60 aa, Artificial Sequence
  Synthetic
DEIEKVRKDVDEIIRRLEEELEEVAKRLEDLNREIERILREVKKESDDTIRTIERLRKEG

SEQ ID NO: 17254 - protein, 56 aa, Artificial Sequence
  Synthetic
ESIVKEVRDKLRRLEKRLDDLAKRNEESLRELKRTLEEIIKRSRKENKRIEDEVRK

SEQ ID NO: 17255 - protein, 60 aa, Artificial Sequence
  Synthetic
SEVEEVEKELRELIREDKERLDRLRKELKESIDTNKEKLDRVKEDLERLIEEIREEARRR

SEQ ID NO: 17256 - protein, 59 aa, Artificial Sequence
  Synthetic
RERLTKLVEKIREVLERSKEHSERVAKKIRDELDKLHKETERVDRKLKTEARRLKEELR

SEQ ID NO: 17257 - protein, 60 aa, Artificial Sequence
  Synthetic
DEVERVEEELKESIDRNDEELRRVRKENRESIEKDRRDLKRVEDDLRRLIKKIDEEVRRR

SEQ ID NO: 17258 - protein, 59 aa, Artificial Sequence
  Synthetic
EEALREVVRKLRKLLKELHEETKRVMEKLRKLDRESEEHTKEVDERIKKTIEDLERELK

SEQ ID NO: 17259 - protein, 60 aa, Artificial Sequence
  Synthetic
SEVDEVRKELRKVIKEDEDTMRKLEEENRKSIEEIRKELEKVEEELERVIRRIEDEIRKR

SEQ ID NO: 17260 - protein, 59 aa, Artificial Sequence
  Synthetic
REVLETLVRKIREELKRSKEHSKRVADDLRRMDEEIRREVKRVVDKVRELLKRLEDELK

SEQ ID NO: 17261 - protein, 60 aa, Artificial Sequence
  Synthetic
DEVEDVLRRLKELAEEDKTKLKEVEKENKESIKEDRKRLEDVRRELEKLIEEIRREVTER

SEQ ID NO: 17262 - protein, 59 aa, Artificial Sequence
  Synthetic
EKVLRDVSRRIKEEVEKSKKHSEEVKKELEDADRESKRHTEEVEKKIRELIERLKRETK

SEQ ID NO: 17263 - protein, 61 aa, Artificial Sequence
  Synthetic
DEIDRLREELKRLIDKDKTDLDRVRKENEESIRDDERKLREVEKELRDLIEEIRRKAKERN

SEQ ID NO: 17264 - protein, 59 aa, Artificial Sequence
  Synthetic
RRVLEEVARKIRELIRRSEKHSEDVMEKVRRNDERSKRHTEDVTRKIRTEIEKIDRELE

SEQ ID NO: 17265 - protein, 60 aa, Artificial Sequence
  Synthetic
KEKEDVKKRLDEEAEKNKRTSEEAKRRNRESIRRNKETSKRVKEENRRSFEELDDLLRRG

SEQ ID NO: 17266 - protein, 55 aa, Artificial Sequence
  Synthetic
KRVEEELDKLMEEIRRHNRESNEELKRLVEEIRKHNRESNEELKKLLEEIERKTE

SEQ ID NO: 17267 - protein, 60 aa, Artificial Sequence
  Synthetic
DEDKDVEKKLRDIIKRNKETSRDVARRLEEIIKRNKKTSDEVATEVRKLIKEIEDVLRRG

SEQ ID NO: 17268 - protein, 55 aa, Artificial Sequence
  Synthetic
EKVKEELRRLIEEIKEHNERVLRKLRKLVEEIERTNEDIRRELKELVEDIRRKAK

SEQ ID NO: 17269 - protein, 60 aa, Artificial Sequence
  Synthetic
SEKEEVRKRLRDKVEDNKRTSKEVADKLRKIIKENKDTSKKVMEDLRRIIEEADELLRRG

SEQ ID NO: 17270 - protein, 55 aa, Artificial Sequence
  Synthetic
DDVRRELDELVKRIAEENKRVEDELRRLVKEIEDHNEEVKRELKELVKRIEEKTR

SEQ ID NO: 17271 - protein, 60 aa, Artificial Sequence
  Synthetic
SEKEEVEREVEERLRDNKRTSDKVVEENRDSVRRNKKTSEDVKRENEESVRRIDEVLKRG

SEQ ID NO: 17272 - protein, 55 aa, Artificial Sequence
  Synthetic
EDVKRKAKRMVEEIRERNRKSNEELKKLAEEIRKHNKDSNKKLKELVDEIRRKAK

SEQ ID NO: 17273 - protein, 60 aa, Artificial Sequence
  Synthetic
DEERRVREKLKKIIKDNEDTSRKVREDVKKELDDNRRTSEKVARDNERSIEEIKKALERG

SEQ ID NO: 17274 - protein, 55 aa, Artificial Sequence
  Synthetic
EEVRRELDKLVKEIKERNDEVIEEARERVKRIREKNERSNRKLKKEAKKIEEEAR

SEQ ID NO: 17275 - protein, 60 aa, Artificial Sequence
  Synthetic
DEDREVERDLKKIIKDNKRTSEEVEKKLRDIIRKNEKTSKEVEKELRDIIRRADELLRRG

SEQ ID NO: 17276 - protein, 55 aa, Artificial Sequence
  Synthetic
EEVKKDLDRLAEEIKKRNEEVRKDLDDLVRKIEKRNEEVKEELDRLAREIEEKAR

SEQ ID NO: 17277 - protein, 60 aa, Artificial Sequence
  Synthetic
SEEDEVRRRLRRIIEENRRTSEEVRERLRKIVEDLERTSRDVRRKLREIVERIKEVLTRG

SEQ ID NO: 17278 - protein, 55 aa, Artificial Sequence
  Synthetic
REVEEELRRLIEEIERRNKEVREELDRLIEKLEDDNRKVHKELRELAKEIKDRAD

SEQ ID NO: 17279 - protein, 60 aa, Artificial Sequence
  Synthetic
RELEEVVKRIRDILREIHERSEKSAEENRRLIEKAEEDSKRSAKRIREIIREIREEVKRI

SEQ ID NO: 17280 - protein, 62 aa, Artificial Sequence
  Synthetic
RDVREKLERVAREVEKSNKDNRDHSKRVEEESRELLKKLRKHSEDVAREVKKLLDELREETR

SEQ ID NO: 17281 - protein, 60 aa, Artificial Sequence
  Synthetic
SELEKVVEDIRRLLRKIHEDSKRSVRKNEELVEELKRLSEKSEREIEELLRRIKELLKRI

SEQ ID NO: 17282 - protein, 62 aa, Artificial Sequence
  Synthetic
ERVKRKLDDVEREVRKSNEDNRKHSDEVRRKSEDMLEKLRRESERVADRVRKVLKELEDERR

SEQ ID NO: 17283 - protein, 60 aa, Artificial Sequence
  Synthetic
SELEKLAKEIEEILREAKERSKESAERIRKLVRDLRELSRESEERIRKIETDVKKKIDDI

SEQ ID NO: 17284 - protein, 62 aa, Artificial Sequence
  Synthetic
REVRRKVEDVERRVTKVLKELEDRSREVEEEVERVLRDLKRHSDEVRREVEEVLRRLTERTK

SEQ ID NO: 17285 - protein, 59 aa, Artificial Sequence
  Synthetic
SEREKIAEDIRKLVDESRRNLEDVVRRARELAERVRRNLKRVMETLERLAEEIRRIIES

SEQ ID NO: 17286 - protein, 55 aa, Artificial Sequence
  Synthetic
KDLERELKELLDKHKKDLDDVREEIRRMLETHKEELDRVKKRVEDVLREAAERTR

SEQ ID NO: 17287 - protein, 59 aa, Artificial Sequence
  Synthetic
DERERIREEVRKLARESKENLKRTEEDLKRRLEEVKRNLERVDEEVERLVRTVAEIVRK

SEQ ID NO: 17288 - protein, 55 aa, Artificial Sequence
  Synthetic
EELKKEAKKLLKEHRDKVKEIKEDLKRAHEEHRKRLEEVVEKLKRVLRDLAEKVR

SEQ ID NO: 17289 - protein, 59 aa, Artificial Sequence
  Synthetic
SEREEIVKTLRELVKRVKENLKRVTEEARKLADESRRNLERVAEEIRKIAEEVKRIVER

SEQ ID NO: 17290 - protein, 55 aa, Artificial Sequence
  Synthetic
KDLEKELEDVHREHKRRLDEVVREMEDLLRKHEDDLRKVKREAEKMLKELTETTK

SEQ ID NO: 17291 - protein, 59 aa, Artificial Sequence
  Synthetic
SEREEIAERAERLSREVKKKLEDIRREIEELAKRVLDNLRRVLRDVERLIEEVKDIIRR

SEQ ID NO: 17292 - protein, 55 aa, Artificial Sequence
  Synthetic
KKLKDDLDRADEELERRARKVDEDLKELHERHRRLLEDVRRELERVIKELKEETE

SEQ ID NO: 17293 - protein, 59 aa, Artificial Sequence
  Synthetic
SDRERIAKRARELSERVKEKLEEILKEVRKISKDMKKRLEDILREAEELSRRIKEIVES

SEQ ID NO: 17294 - protein, 55 aa, Artificial Sequence
  Synthetic
DELRKELEEVDDELRRKIEEIKKELETMDKELRDRAKEIEKRLEDSNREVEERRR

SEQ ID NO: 17295 - protein, 59 aa, Artificial Sequence
  Synthetic
SEREEIAKTVRKLSREMKETLKKITEEARRLSEEVKRALKKIVDDLRELMKDVKRIVES

SEQ ID NO: 17296 - protein, 55 aa, Artificial Sequence
  Synthetic
KDLKKELEDVDRELADTIRRVEEELKKVNEELRKRVEDVREEAERALRELEERVR

SEQ ID NO: 17297 - protein, 59 aa, Artificial Sequence
  Synthetic
DERERIAEELKKLTEEIRRRVEDVMREAERLAEEIKRKLEDVLEEVRRLSDRIREIIES

SEQ ID NO: 17298 - protein, 55 aa, Artificial Sequence
  Synthetic
DDLRREAEKVNRKVREDLKRIEDRMRELLKEVEDLLRKIEEEARKSNKELEDRTR

SEQ ID NO: 17299 - protein, 61 aa, Artificial Sequence
  Synthetic
SEAEKAREDVERAAKESKDKLDEIRKEVEKAARESREEAKRNEKDIKDAAKKLRELARDKK

SEQ ID NO: 17300 - protein, 55 aa, Artificial Sequence
  Synthetic
RDVLEELRKIAEDDKRRVDKVARELRELAKRDKEEAKKVHDENKKSAKEAEDELR

SEQ ID NO: 17301 - protein, 60 aa, Artificial Sequence
  Synthetic
SSDETLRRELEKAVEESRRLLEENRKTIEDMVRESKRLLDRNREEIKKLVEELKKLLRDN

SEQ ID NO: 17302 - protein, 55 aa, Artificial Sequence
  Synthetic
RDVLREIRELLKRDKERLKEVHKRNRESAKRDKDRVKDVHRKNRDSARRVKERLR

SEQ ID NO: 17303 - protein, 60 aa, Artificial Sequence
  Synthetic
SSDETARKEIEDMVRESKKLLEEIREELDRVVKRLRRELEENEKDIKRLVKRLRDLLREN

SEQ ID NO: 17304 - protein, 55 aa, Artificial Sequence
  Synthetic
RDVLREIRELAKRDKDTVKKVMEEIRDRLRKLDERIKEVHERNRRSLKDVEDKVR

SEQ ID NO: 17305 - protein, 60 aa, Artificial Sequence
  Synthetic
DEDREAKRRLDEAVKESRDRLEEIRKEVEKMVRENEELNRRNEEEIRKAVEELRELLRRQ

SEQ ID NO: 17306 - protein, 55 aa, Artificial Sequence
  Synthetic
RDVLREIEEELTKDRKRVKEVLEELRRIAKRLKERDEESHERNRRSLDKLKKEVK

SEQ ID NO: 17307 - protein, 60 aa, Artificial Sequence
  Synthetic
SSEDEARKEVDKMAKESEELLRRNEETIRRLVRENEEKNERNRREIERVVRELDRLLKER

SEQ ID NO: 17308 - protein, 55 aa, Artificial Sequence
  Synthetic
RDVLRELREIAERDKKKVEDVHRENRDSARRLKEEDDDSHRRNRKSMKEVKEDVE

SEQ ID NO: 17309 - protein, 60 aa, Artificial Sequence
  Synthetic
REIEEVAKRLRKLVKELKERSKESKDRSRKLMTELKKLSKDSLRELRRLLDELRKILKDR

SEQ ID NO: 17310 - protein, 62 aa, Artificial Sequence
  Synthetic
RDVKKKLDEIRREVKKVIEEDKRLNDESEKDSRRLIREDEDENRRIKEEIDRAVEELRRRRK

SEQ ID NO: 17311 - protein, 60 aa, Artificial Sequence
  Synthetic
SDIERVLEELRRLVERLKRETERFAKELRDLARRVKEMSKRSEEELRELATRLKDTLRRR

SEQ ID NO: 17312 - protein, 62 aa, Artificial Sequence
  Synthetic
RDVEEKLRRIKRELREVIKEDEKRNREIEREVDKVIRELEKLNKRIEDEVRKLEEELERRLK

SEQ ID NO: 17313 - protein, 60 aa, Artificial Sequence
  Synthetic
SDIERMRDRLRKLVEEAREKSDRSREELEKLVRELRRKTEKFLKELRDLARRLKETLKRR

SEQ ID NO: 17314 - protein, 62 aa, Artificial Sequence
  Synthetic
RDVKEKLDRIRKEVEEVARDLKRKNDEIEEEIKKVIRDDERRNEEIEKEVRKMAEELRRTLK

SEQ ID NO: 17315 - protein, 60 aa, Artificial Sequence
  Synthetic
SDIERVRKELRELLERVARRSEKSMRDDKKSMDDLKKEIREVEEELRRLATEVKKTLKDR

SEQ ID NO: 17316 - protein, 62 aa, Artificial Sequence
  Synthetic
RDVKKKLEEIEREIREAIKDLRRKNREIERTNREVIKELREELKRIDTEVKKLVKELRETSK

SEQ ID NO: 17317 - protein, 60 aa, Artificial Sequence
  Synthetic
SELEELERDLERELEEDKRRNEEVMERNERRLRKLKEDVDRVVKELEDLLRKLEKILREE

SEQ ID NO: 17318 - protein, 59 aa, Artificial Sequence
  Synthetic
ESELERLDRRLKKLIKESRETVDEIEERSERAIRDLERKLKELEERLRKKIKELRDETR

SEQ ID NO: 17319 - protein, 59 aa, Artificial Sequence
  Synthetic
DETKKVEDDLRRVDTESKKHLDDVHKESKRVADELRKKLEDVHRRSEEMVRRLRRLLEE

SEQ ID NO: 17320 - protein, 55 aa, Artificial Sequence
  Synthetic
EEVKKRIDDALRENERRAEENRREIERVLKELEDRVDENRRRIEEVRKELRDRAT

SEQ ID NO: 17321 - protein, 59 aa, Artificial Sequence
  Synthetic
DETREVDERLKEADRRSKKHLDDVHKTSKKVLDELRRKIEELERRVRKVVKELEELLRE

SEQ ID NO: 17322 - protein, 55 aa, Artificial Sequence
  Synthetic
EDVRRKVDKIIKENRKMLEDNKRTIEEVLRELKERADEIKERVKKVLKKLEEDRR

SEQ ID NO: 17323 - protein, 60 aa, Artificial Sequence
  Synthetic
DEEEKVERDVERVDKESKEHLDRVHEETRDINRRSEEHLRRVHRDSEDVARRLRDAVRRR

SEQ ID NO: 17324 - protein, 55 aa, Artificial Sequence
  Synthetic
EKVKRRVEEAIKRNRDEARRDEEEVKKAIKRNREEADRNRREIEKVVEELRRRAT

SEQ ID NO: 17325 - protein, 60 aa, Artificial Sequence
  Synthetic
SEKEEVKRRVDEITKRARKKLEDVHRRSEKIDRDSREHLERVHKRTKEILDELRDELRKR

SEQ ID NO: 17326 - protein, 55 aa, Artificial Sequence
  Synthetic
EDLRRRLEKVFRELKETLDRNREEIDRMVKRNRKTLRDNKEEIDRAVREARERLK

SEQ ID NO: 17327 - protein, 60 aa, Artificial Sequence
  Synthetic
REDEEVLKDLKRIVDELRKKLKELHDRSEEIDKRSKKHLDDARRRVEEIMRRIEKRLREE

SEQ ID NO: 17328 - protein, 55 aa, Artificial Sequence
  Synthetic
DKVRKDLKDVAKEMRDRLEENERRIREAAKRNRTELERIERELKEFKDRLDETAR

SEQ ID NO: 17329 - protein, 60 aa, Artificial Sequence
  Synthetic
SEVEKVMEEAKRIVTELEEKIRELERKVKKIDEDSRRHLKEVHDRTAEIAKTLRDILRKE

SEQ ID NO: 17330 - protein, 55 aa, Artificial Sequence
  Synthetic
DKIRREIEEAVERLETEARRLRREVEEAVRRNREMLKRNEKEIKDVAKELRDRLR

SEQ ID NO: 17331 - protein, 60 aa, Artificial Sequence
  Synthetic
REDDRIRDEIRKLVEDNRRLLREILERLKTLADRLREINKKSNDDNERSADELREVLKKV

SEQ ID NO: 17332 - protein, 55 aa, Artificial Sequence
  Synthetic
EEVRREVEKAIRDSKEKLDELEERVRRMIEESEKLVEDNHRRIEEVEREMEEALR

SEQ ID NO: 17333 - protein, 58 aa, Artificial Sequence
  Synthetic
KDEEEIKKAIEELVKRNEDIVEEIKRRSDKLADDLRDINRRSNEDNDRSLKTLEELLR

SEQ ID NO: 17334 - protein, 55 aa, Artificial Sequence
  Synthetic
KEVRDRVRRAIEKSKEDLDKSEDDSRKVIEESKRLVEENHRRIRKAVRKAEEATR

SEQ ID NO: 17335 - protein, 59 aa, Artificial Sequence
  Synthetic
SEEEEARKKLKEAADRNRKVNEDAKKKAEDAARKNKKANEELAKKLKDAAEELKRVSRD

SEQ ID NO: 17336 - protein, 55 aa, Artificial Sequence
  Synthetic
EEIKERAKEVLERHKRSAEKIKEEAKRVLDEHRKRARDWEEEARRVLKEAEEEAR

SEQ ID NO: 17337 - protein, 59 aa, Artificial Sequence
  Synthetic
REEEEVRKEVKKLKKENEDVNDKVRRDLEELLERNRKVNKELEDKIRDAKRRADEMLRV

SEQ ID NO: 17338 - protein, 55 aa, Artificial Sequence
  Synthetic
EEIEEELRKVLKEHKELVERWKREAEEVLEESKRLIDKWKEDLERVLEDFRRKAE

SEQ ID NO: 17339 - protein, 57 aa, Artificial Sequence
  Synthetic
SEAEEIEKRLKEVLDRHDKSAREIKDRLRKVIEEHRKLVEEWEKEARDVVKELKDEN

SEQ ID NO: 17340 - protein, 56 aa, Artificial Sequence
  Synthetic
TRRLRERLRKMEEDNRKINKEIRDEVKELEKENREINKRVEEELKRVRDELKRTAD

SEQ ID NO: 17341 - protein, 57 aa, Artificial Sequence
  Synthetic
DEVEDIKRELEEVVKEHEKSVEDDERKNEDVVRRHDELVKKWEEDLRRVIEKLKRDN

SEQ ID NO: 17342 - protein, 56 aa, Artificial Sequence
  Synthetic
ERDLRRRVKDLKRRNKEMNERSKKHSDEVKEENKRINEEVEKKLRDVKEKLDRDIK

SEQ ID NO: 17343 - protein, 59 aa, Artificial Sequence
  Synthetic
SELEKLIKEVEDLAKEVADKLRKSNKELRELVRKIAKALEETNREIEKVVRRVKRLLES

SEQ ID NO: 17344 - protein, 57 aa, Artificial Sequence
  Synthetic
KLKKIKEDLKRIADEIRKIVEDSKRDLERVADEARKIVEKSKEDLKRAKEEAEKETK

SEQ ID NO: 17345 - protein, 59 aa, Artificial Sequence
  Synthetic
DELDELTKRARELVERNRRHIERSNRELKRLVKEVLDRNRENHKTVEELVKTVLKLAKD

SEQ ID NO: 17346 - protein, 59 aa, Artificial Sequence
  Synthetic
RSDVERVRKELKDSTDDIKRLVDKSREDLKRAKEKDEKSVRDNRERLRRVLRRLEEEVR

SEQ ID NO: 17347 - protein, 59 aa, Artificial Sequence
  Synthetic
SELEKLTKEVRDDVRRVMERLKRSNDDIRRLAEEVIRRNDESRKKLEKLVEEVKDLFRR

SEQ ID NO: 17348 - protein, 57 aa, Artificial Sequence
  Synthetic
KVREIERELDEVRKRLEDLVRKSKEDLDRVREELERLVEKSKRDLDKARRDLDEARR

SEQ ID NO: 17349 - protein, 59 aa, Artificial Sequence
  Synthetic
DELEELEKKVREDVRRVKEKMERSHRETEKLARDVKKRLEDTNREIKKLVKEVEDILRR

SEQ ID NO: 17350 - protein, 59 aa, Artificial Sequence
  Synthetic
KSKVEKVRRDLDEARKRLEELDRRNRKRLEEVRKEIREIVEKSKEDLKRAKDRARETVR

SEQ ID NO: 17351 - protein, 59 aa, Artificial Sequence
  Synthetic
SEAEALIEEVKTLVRRNKEHAKRSHEKTEKLVRDVADALRKTNDEARKLVEEVRRILES

SEQ ID NO: 17352 - protein, 59 aa, Artificial Sequence
  Synthetic
KSKLERLKRELTRSAEELRELDKRNEDELRRAAKRIRDIVRKSEEDLKKVRDDAREKTR

SEQ ID NO: 17353 - protein, 60 aa, Artificial Sequence
  Synthetic
KDVEEVRKELDEIARRVTEEIKRVHDETARIVDRLRERLEKVTRDNRRSVRELEKELERN

SEQ ID NO: 17354 - protein, 59 aa, Artificial Sequence
  Synthetic
EKKLREAKKRLDELAERLKRLIDRNREEIKRVAREADERIRENEKEVEEVEERLDRKIK

SEQ ID NO: 17355 - protein, 60 aa, Artificial Sequence
  Synthetic
KDAEKVVEDLERKADAVMRKLEDVSRRHREIAKRIKDRLEKVHRDNEKSVEDLKRILKRN

SEQ ID NO: 17356 - protein, 59 aa, Artificial Sequence
  Synthetic
EEIVRRAEKKVEDFERRLRKLIEDNKREVDKVEKELRDTIRRNEERIREAVEELKRTSD

SEQ ID NO: 17357 - protein, 60 aa, Artificial Sequence
  Synthetic
EDVRRVVEELRKIAEDAKEKARRVHERDRERVRKVEEDAKKVHEENEESVTRLERLLDRR

SEQ ID NO: 17358 - protein, 59 aa, Artificial Sequence
  Synthetic
EDDVRRIREEVEKVRKDLKDIVKRNKEANDEVEKRLRDIVRRNRERIEEMRRRLEEKKR

SEQ ID NO: 17359 - protein, 60 aa, Artificial Sequence
  Synthetic
EDVKRVVKELEDIAEEVRRRLEKVNRENRESMKRLEEELRKVHEENRESIERLKRTLKDR

SEQ ID NO: 17360 - protein, 59 aa, Artificial Sequence
  Synthetic
EEIVKEAKERVDKVKDDLRRLIEENERDIRRMDRKLEDEIRRNDEELRRVVREAEETVR

SEQ ID NO: 17361 - protein, 60 aa, Artificial Sequence
  Synthetic
SDVERVRRELREIAETVKERLREVNERNRKSVRDVEEIVKKVHEEDKDLARKVEEILERN

SEQ ID NO: 17362 - protein, 59 aa, Artificial Sequence
  Synthetic
KERVDDIKREVDKAREDLRRLIEENKRDIKEVVERLEKLIKDNRDDNDRLRRRLEEKSR

SEQ ID NO: 17363 - protein, 60 aa, Artificial Sequence
  Synthetic
SELEKVEKELKRIVDEVKKELKRVHEDDERLVRELEESLKKVTEDDRRLARELEDTLRKR

SEQ ID NO: 17364 - protein, 59 aa, Artificial Sequence
  Synthetic
EEDARRAEERVRRVVKELKELIERNKKRNKEAVERLRRLIEENKRENREVEKRARDTAR

SEQ ID NO: 17365 - protein, 60 aa, Artificial Sequence
  Synthetic
KDAEEVLERLKKIAEEVAKELRDVDEENRRLLKRWAEILEEVTREDERLARELEERLERR

SEQ ID NO: 17366 - protein, 59 aa, Artificial Sequence
  Synthetic
EEKLRRAKEEVDRAEKELRELIKRNKDNLERAVRELEKLIEENERRNREVEKRLEDRER

SEQ ID NO: 17367 - protein, 60 aa, Artificial Sequence
  Synthetic
KDVEDVVRRLEEIAKRVKERLKEVDKRNKDKAREWLKEVKEVHERNEKLAEEVRRTLKDN

SEQ ID NO: 17368 - protein, 59 aa, Artificial Sequence
  Synthetic
EEIVREAEKRVREMERELRELIERNKRNVEEMDRRLEELIKENEERNKRVEEDLRRKTK

SEQ ID NO: 17369 - protein, 60 aa, Artificial Sequence
  Synthetic
DEVEEAKRRLTELVDRLRKTLEKVSREDRELEERVRKITKDSHDTTEEILKRLKRELEKG

SEQ ID NO: 17370 - protein, 59 aa, Artificial Sequence
  Synthetic
EKDLRELEERVRRAVKKLRDDLRRNKKESEEVKKKLEDENKKNRDRVAEAEEELRRRTT

SEQ ID NO: 17371 - protein, 59 aa, Artificial Sequence
  Synthetic
DEVREMLRTLDEIARRLKKRTKESIDTDRRLVKKLREETDKSIEDDKKLVKEVEELLDG

SEQ ID NO: 17372 - protein, 59 aa, Artificial Sequence
  Synthetic
ERKLRELEKRIRKAEEELRRDNERSKKETEDVERDLERKNEESERRTREAEKRLKERSD

SEQ ID NO: 17373 - protein, 59 aa, Artificial Sequence
  Synthetic
SEVEEVLKRLRDIARELEKLIEEVIRRDRKLVEELKRRSERSIETDRRLVKRLKEMLDG

SEQ ID NO: 17374 - protein, 59 aa, Artificial Sequence
  Synthetic
EEKVRRAEEEIREVERRLRKLLRDSKEETKEVVKELRRLNEESKKETEKVVREAEKRTK

SEQ ID NO: 17375 - protein, 59 aa, Artificial Sequence
  Synthetic
KDAEEVVRRLTKLVEDLKRKIEEVIREDKELVDRVRDTSRKSDETLEKLVREVKKLLRE

SEQ ID NO: 17376 - protein, 59 aa, Artificial Sequence
  Synthetic
EEKLKRLEDRVREAEKELRELLERSEDTTRRAERELEELNRRLEDKIRRVVEELKEESR

SEQ ID NO: 17377 - protein, 59 aa, Artificial Sequence
  Synthetic
SEVEDVLRRLERLVRELEKETKRSLEENEKLARRLKKKLEDVVRDNKRLVDEVKELLKE

SEQ ID NO: 17378 - protein, 59 aa, Artificial Sequence
  Synthetic
EEKLRRLEKLVRDAARRLKELNDRLRKRSKEVKEELERILRELKERSDRAKEDLRRAAK

SEQ ID NO: 17379 - protein, 60 aa, Artificial Sequence
  Synthetic
SELEKVEKDLEKLIRDDEEENKRVLEELERLVREDKEKNKRVHDETRKLEDTLRRILEKS

SEQ ID NO: 17380 - protein, 62 aa, Artificial Sequence
  Synthetic
EEAKEKLRRLKERIREAEEKSRKSLRDIEETLKKVKRESEETDRRNRDTLRRAKKRLKDETR

SEQ ID NO: 17381 - protein, 60 aa, Artificial Sequence
  Synthetic
DEVEEVKKTIRDLLRRNKEISRETLERLKKLVDENRERNKKVHDETKKLTEEIKKILEEI

SEQ ID NO: 17382 - protein, 62 aa, Artificial Sequence
  Synthetic
EEAEKELRKLEKEVKDAKEESERSDRRLEKEIRDVERDSERSDRENRDEIRRVAEELDERSR

SEQ ID NO: 17383 - protein, 60 aa, Artificial Sequence
  Synthetic
SEAEKVLRDLEELVRENEEKSERSLRELEKLVRDNEEKNKEVVKRIKDLAERIRRILEEI

SEQ ID NO: 17384 - protein, 62 aa, Artificial Sequence
  Synthetic
EDAKRKLEEIRKTLEEVKRRSEDSNRELRRRLEEVKRRSEKSLRDLEELVRRIKKELDDRSR

SEQ ID NO: 17385 - protein, 60 aa, Artificial Sequence
  Synthetic
SEADKLREDLERRVREIEKRSRDSDKRLEELLEEIRRRSKRTLDELERRLREVEEELERE

SEQ ID NO: 17386 - protein, 59 aa, Artificial Sequence
  Synthetic
KKKVDRVRDEVRKVKRKLEEEHKKLERKVREARKELEKSHRDLNREVKKAKERLDRKRD

SEQ ID NO: 17387 - protein, 60 aa, Artificial Sequence
  Synthetic
DEVEKLRKELEDLAEKIKRESEKTLRELKKLADEIRKLSEDTLRRLKELLDRVEELLRET

SEQ ID NO: 17388 - protein, 59 aa, Artificial Sequence
  Synthetic
ERKVRELEKTVEKIKRELEKSHEDLNREVEKIKRDLERSHKELNELVKRAEERLRRETK

SEQ ID NO: 17389 - protein, 60 aa, Artificial Sequence
  Synthetic
SRVEELKRRLEELIERIDRESKRTLKELKDLAREIKELSERTLRELERLAKEVKEELDRI

SEQ ID NO: 17390 - protein, 59 aa, Artificial Sequence
  Synthetic
EEKVKELEERVRRVDEELERSNERLRREVKKIKEELKESHERLNKRVEEIRRELRERSR

SEQ ID NO: 17391 - protein, 60 aa, Artificial Sequence
  Synthetic
DEAERLEEEIRRLAEEIKRLSKESLERVEKLLEEVRRESKRTLEDLERLVRDVEDKLRKI

SEQ ID NO: 17392 - protein, 59 aa, Artificial Sequence
  Synthetic
EEKVRRLKKRIDEIKEELKKSNEDLHRRIEEAKRELEELHERLNRDVERVKEKLRRDAK

SEQ ID NO: 17393 - protein, 60 aa, Artificial Sequence
  Synthetic
RELEELLKTLEELLKKIEEESRRSLEELKRLVDDIRRKSEESLERLERLAERVKEVLDRE

SEQ ID NO: 17394 - protein, 59 aa, Artificial Sequence
  Synthetic
KEKIDRLEKRVRDAKKRLEDLHRELNKRVEDVKRDLEESNKRLHDTVREIKKELRERTR

SEQ ID NO: 17395 - protein, 60 aa, Artificial Sequence
  Synthetic
DEVRELEERIDRILKKIEDESRRTLEEIKKIAREVEKRSEDTLRELDDLVRRVEELLERI

SEQ ID NO: 17396 - protein, 59 aa, Artificial Sequence
  Synthetic
EKDVRRLEKKIREAEKRLRESNERLEKTIRDIKKRLEKLNKELKDRVDEVVKRLRDKTE

SEQ ID NO: 17397 - protein, 60 aa, Artificial Sequence
  Synthetic
SELEELLERLKRRADEIRKESEKTLEELDRDARRIEKESRETLEELKKRLDDVRRALEET

SEQ ID NO: 17398 - protein, 59 aa, Artificial Sequence
  Synthetic
KKKIDDLRRKVEEIEKDLKRSNDELRKRVKEIKDRLKELHDKLNEDVKRARKELEERRK

SEQ ID NO: 17399 - protein, 60 aa, Artificial Sequence
  Synthetic
SEAEELLERLDRRLRRVEETSKRTLDELKRLLEDIERKSRKSLKELEDLVRKVKDMLRRE

SEQ ID NO: 17400 - protein, 59 aa, Artificial Sequence
  Synthetic
EKKIRDLERRVEEAARRLEKSNRDLAEEVERAERRLDRSNRELRRRVEKVLKELEDTER

SEQ ID NO: 17401 - protein, 60 aa, Artificial Sequence
  Synthetic
SELEELEKRLEDLAREIKRRSRESLKELEELVKRIEETSKRTLDELKRLLDEVVKELRRI

SEQ ID NO: 17402 - protein, 59 aa, Artificial Sequence
  Synthetic
EEDIRRLEERVEKIREDLERLNRELHETVKRVKKRLEDSNRRLKEEVRKAKRRLDEELK

SEQ ID NO: 17403 - protein, 60 aa, Artificial Sequence
  Synthetic
SEAEELTERIRKILKEIRELSEKSLRELRELVKTITELSKESVERLKRRVEEVKEELRRI

SEQ ID NO: 17404 - protein, 59 aa, Artificial Sequence
  Synthetic
ESKVRELEERIRRAEEELKKRNEDLHREVRKVLKELRDSNKELEKEVKRVKKELRDESR

SEQ ID NO: 17405 - protein, 60 aa, Artificial Sequence
  Synthetic
SELEKLAEDLERLAEEIKRESDRSLEELRELAERIKRESRKTLEDVKKLLKEVKEVLDRE

SEQ ID NO: 17406 - protein, 59 aa, Artificial Sequence
  Synthetic
DKKIEDLRRRVEEIIKRLEKSNRDLRKEVEDIKRELEKLNKELHDTIREAKERLDRTTK

SEQ ID NO: 17407 - protein, 60 aa, Artificial Sequence
  Synthetic
REVEELLKELEKVVRENEKKIEDLHKRNEDVVRKIEKDHRDSEKELKEVADRVRELLERK

SEQ ID NO: 17408 - protein, 59 aa, Artificial Sequence
  Synthetic
EDDVRRLKKRAEESLKKIEDDLRRDEDRLRRVIEKSKRLVDKLREELERVLREIEKRIR

SEQ ID NO: 17409 - protein, 60 aa, Artificial Sequence
  Synthetic
SEAEKLKEDLDRVVEKVKEDLKRLHDENRRVAEKNERVIEELHRRNREVTKELEKRLEEK

SEQ ID NO: 17410 - protein, 59 aa, Artificial Sequence
  Synthetic
EEKVKRLRDAVRKVLKEIEEELERDERAVAKTLRKIEELLKRDKKELDKVRKRLEERLR

SEQ ID NO: 17411 - protein, 60 aa, Artificial Sequence
  Synthetic
SEAEKIEEELRRAAETAKKRHEDSERELEEAAKTAEERAKRIHDRNERAAEEAKKRAEDD

SEQ ID NO: 17412 - protein, 59 aa, Artificial Sequence
  Synthetic
EEKATRIKREADEARKESKKLAEKLKKRADEARRKLEEEAKRDKERADRAAKEIEDRAR

SEQ ID NO: 17413 - protein, 60 aa, Artificial Sequence
  Synthetic
SEVEKLKEDLKRVVERVKRDHERSLKRLEDVAREVEKRIRDLHERSKDVMRRLKDLIDKK

SEQ ID NO: 17414 - protein, 59 aa, Artificial Sequence
  Synthetic
EDELRKLAEDIKRAEDESRKLVERLKKKAEEVRRKIKKLLEENEEELKRILDRLREAAK

SEQ ID NO: 17415 - protein, 60 aa, Artificial Sequence
  Synthetic
SEVEELLERLKKVADDIRREIEKLHKRTKEVADEVRKRHEDSRRELEKVADEVRDRIEKD

SEQ ID NO: 17416 - protein, 59 aa, Artificial Sequence
  Synthetic
SKALKRLSDEIKKIEDEIRKLLEDNRREVEEAEKESRKLVEELERRAKEVEEEIKRARD

SEQ ID NO: 17417 - protein, 60 aa, Artificial Sequence
  Synthetic
SEVEKILEDLKRVVDEVRKRHKESLDRNKKVADEVRELHERSDKELEDVVREVKDKLEKN

SEQ ID NO: 17418 - protein, 59 aa, Artificial Sequence
  Synthetic
SKDVKRIEDELRKANEESRRLVEELRKHSEDVNRESRKLVEDLERKLRKAEKDIEDDAR

SEQ ID NO: 17419 - protein, 60 aa, Artificial Sequence
  Synthetic
SEVEDLLRRLKEVVEEVERLIKKLHKETKEVVDEVRRLHEKSLRELKKAADDARDALRRN

SEQ ID NO: 17420 - protein, 59 aa, Artificial Sequence
  Synthetic
EEKVRRLAEEVKRALDRIKELIKRNRDELKRANEESKRLVERLREEAERILRDLRRKLD

SEQ ID NO: 17421 - protein, 60 aa, Artificial Sequence
  Synthetic
SEVEKIKKDLEKVADEVRRLHKESLDRLKKVVREVEERLKRLHEESEKVAKDVRRKVEEK

SEQ ID NO: 17422 - protein, 59 aa, Artificial Sequence
  Synthetic
EREVKKIKDDLDRVNEESRRLVEKLERDVTRVRKKIKEELKKNADRLKEVEEDIKRRAK

SEQ ID NO: 17423 - protein, 60 aa, Artificial Sequence
  Synthetic
SEVEELERELKEVVDRVRKLHRESLERNREVVRKVDEDIKKLHRESEEVAKEVEKLIEEV

SEQ ID NO: 17424 - protein, 59 aa, Artificial Sequence
  Synthetic
ERDLKRLEDEARKANKESRDLVREIERHSREAMKRIEEELRRNKERLERVLKKIEDKAR

SEQ ID NO: 17425 - protein, 60 aa, Artificial Sequence
  Synthetic
SEVEKLLEDLKRVAREVEKLLEDLHRRTDEVMKRNEDDIRRLHEESDRVVKRVKDEIEKK

SEQ ID NO: 17426 - protein, 59 aa, Artificial Sequence
  Synthetic
ERDLKRLKDEAKRIEDKIRELLERNREKARRTKEKIKKLVERNRRELEKVLDEIRRRIK

SEQ ID NO: 17427 - protein, 56 aa, Artificial Sequence
  Synthetic
KEVEDVEKRNREVHRRIEKLIEENERRLKEVRDRIRKLVREIEDLNRRVREEVDRR

SEQ ID NO: 17428 - protein, 59 aa, Artificial Sequence
  Synthetic
EEVLRDLLRRNEEVVKRVEDNLRRDTERLEKVAKDVEKKLREVLKRNKEMVDEVRKKTK

SEQ ID NO: 17429 - protein, 60 aa, Artificial Sequence
  Synthetic
SEEEDVLRKLEKIVTDLRETLKRMHEDSERIVEESRKHARKVHEDSKKIVRELKKVLDEK

SEQ ID NO: 17430 - protein, 55 aa, Artificial Sequence
  Synthetic
EEVRRRVEEIRREIERELKRNRERLEEVERENRKLLRENKEELDKVEKDLRDTAE

SEQ ID NO: 17431 - protein, 57 aa, Artificial Sequence
  Synthetic
DDIKRLEDEVRKAAEENKDEVRKNREELKRIKDEIDKLVKDVEETIRRAEDEIRKRV

SEQ ID NO: 17432 - protein, 59 aa, Artificial Sequence
  Synthetic
KRVMEKVLRELKEIVDRSRDHLRRVHEDSKRIADELRRKIEELLKRIKKVVDELREAIR

SEQ ID NO: 17433 - protein, 58 aa, Artificial Sequence
  Synthetic
DDLRRIEKELKRLADRARKINRESDERIKKLEEEIRRINEDSLRRDRDLARRLREMLK

SEQ ID NO: 17434 - protein, 58 aa, Artificial Sequence
  Synthetic
REVKKLKEDLDRVKRELEKLNEEIRDRIRRVKEELKRLNDRSKKHTKEVEEEVERRKK

SEQ ID NO: 17435 - protein, 60 aa, Artificial Sequence
  Synthetic
SEAEDILRRIKRLADENRRILKEILDRIKELADRVRKINEDSLRTLRKLAEELRRVAEKV

SEQ ID NO: 17436 - protein, 58 aa, Artificial Sequence
  Synthetic
EKAERLEREVRKIEKESREMLKRIEDEIRKVEEDLRRLNEELERDVRRVEEEVKRAAD

SEQ ID NO: 17437 - protein, 58 aa, Artificial Sequence
  Synthetic
DELDDIRRRLEKLEEEAERINRESEKRDRELARRIREINKRSKEEDRRLAKEVDEILR

SEQ ID NO: 17438 - protein, 58 aa, Artificial Sequence
  Synthetic
EAVEELRKKIEEVEKKLRRLNEKSKKHTKDVRDELRRLNEDSKRHTDEVKDRLEEATR

SEQ ID NO: 17439 - protein, 60 aa, Artificial Sequence
  Synthetic
DELRKIREDLKRLATEAREINKRSDEDIKRLTDDVRRINKESLERLKKLADDLRDALRKV

SEQ ID NO: 17440 - protein, 58 aa, Artificial Sequence
  Synthetic
EAVKELEEEIRKVKEELKKLNKEIEDKIRDVERELRETNKRLEDEVRRVEEEVRRATK

SEQ ID NO: 17441 - protein, 60 aa, Artificial Sequence
  Synthetic
DDAERILDEIRRLTEELREINKESLKKVERLAERIREINKDSLRRDKELADRLRRMLEEV

SEQ ID NO: 17442 - protein, 58 aa, Artificial Sequence
  Synthetic
EKVERIERTIRKVARELEKLNEDIRKRVDEVEEELKKLNKESEDHTRRVREEVRRRTQ

SEQ ID NO: 17443 - protein, 59 aa, Artificial Sequence
  Synthetic
SELETVEERLKRLEEEIRRLLEKVDRDLDRLADEVRKKNKRSHERNKEIEDRIDKLLKD

SEQ ID NO: 17444 - protein, 62 aa, Artificial Sequence
  Synthetic
EELKKMLRKLEERVKEVTRELEDLLKKAEEKVRRVKDELRRSNKKDEDRLREVEEKLREDSR

SEQ ID NO: 17445 - protein, 59 aa, Artificial Sequence
  Synthetic
SELEEVRKRAKDIADEDRELNRRVHEENKRLADDVRRKNEKSHRDNERIATELRELLRD

SEQ ID NO: 17446 - protein, 62 aa, Artificial Sequence
  Synthetic
EELKKLLDELRKRVEDVKEESKRSLDRDRRELERVKKELDDSNDEDRKRIEEVIKEVRDRSK

SEQ ID NO: 17447 - protein, 60 aa, Artificial Sequence
  Synthetic
DEEREVKERLKELIERLRRLHEESLRELKRIADELRRLHEESHKRNEDIARELERLLAEV

SEQ ID NO: 17448 - protein, 55 aa, Artificial Sequence
  Synthetic
DELERRVRKVEEESKKLHEEIRKRIEEIERESRKLHEDDRRRIEEVLKRIKDAVR

SEQ ID NO: 17449 - protein, 58 aa, Artificial Sequence
  Synthetic
SDEDRLREEAKKVADELRKLHEESHKRNKEIADELRKLHKKSHDDNKRIADEITELLK

SEQ ID NO: 17450 - protein, 55 aa, Artificial Sequence
  Synthetic
EELRDRLRRVEEESRELHKRDREEVERIRRESEKLHREDREDVKRIEKKLRDDAR

SEQ ID NO: 17451 - protein, 60 aa, Artificial Sequence
  Synthetic
DEAEKVLEELRRRAEKVLREVKKVLEDHKRLADELRKELKRVSDENRDSLRRLLEEIDRN

SEQ ID NO: 17452 - protein, 59 aa, Artificial Sequence
  Synthetic
EDLLRRLRELLDEIRKELRDLIRKLRELNDRVERDLRRIIRENRELVRRAEKELEDRTR

SEQ ID NO: 17453 - protein, 60 aa, Artificial Sequence
  Synthetic
DEAEEVLERIKDLARKNEEKNRRVLEEHEKLIRESEERDEKSSRDNKRSVDEIRDIIRRK

SEQ ID NO: 17454 - protein, 59 aa, Artificial Sequence
  Synthetic
EEKIKRIRDELARWAEKIKKTIDELRKLNKEAHDRNRKTIKENEDLVREAKEDLERKTT

SEQ ID NO: 17455 - protein, 60 aa, Artificial Sequence
  Synthetic
SEAEEVLKEIKKLADELRKKNRESVEKVRESSKRLKDEIRKVLEDIKRLAEKLREILREM

SEQ ID NO: 17456 - protein, 59 aa, Artificial Sequence
  Synthetic
EKLLRELEKLIRDIKRELDRSDEKLEELVRRSAKELDDLLDTLREIIERIKRDLDEKLR

SEQ ID NO: 17457 - protein, 60 aa, Artificial Sequence
  Synthetic
REAEEVLKRIKELADEIRKRNRESLERIRKSSEDLKRENEDSIRRVRELIDTLRRRLEKE

SEQ ID NO: 17458 - protein, 59 aa, Artificial Sequence
  Synthetic
KELVDRIRDLIRRIKDELKESDDRIKELIDKSKEDLDKSDEDLKREIDKAREELAKAIK

SEQ ID NO: 17459 - protein, 59 aa, Artificial Sequence
  Synthetic
DEVEELLKEVEELAREIVERLEKNLRDTKKLIDEIEEYARRNEERTRKLIEEAERLARR

SEQ ID NO: 17460 - protein, 59 aa, Artificial Sequence
  Synthetic
EELERRLRRLLEELERRLKRLEDEHRRLVEEVRDKLRKIEETHREIVERVRRTLDEEKR

SEQ ID NO: 17461 - protein, 59 aa, Artificial Sequence
  Synthetic
DDARRLLEEVKELLERSKRHLTKNLEDTRRLIKELLDYARRNLEDTRRLIEEVLDLLKR

SEQ ID NO: 17462 - protein, 59 aa, Artificial Sequence
  Synthetic
EEVKETLKRLLDEIRRENEKVARDHKKLVDDVERELEDIERRHKELVDRARKVAEDEKK

SEQ ID NO: 17463 - protein, 59 aa, Artificial Sequence
  Synthetic
SDAERILDEVRKLVEDSKRHLDENLKRTAELSKRSKEYAEENLDRTRRLAKEAADIARR

SEQ ID NO: 17464 - protein, 59 aa, Artificial Sequence
  Synthetic
EKVKEDLKRLLDEIRKENKRAEDAHRDLARRSREELEKAERKHKELVDRIRKALEEIKK

SEQ ID NO: 17465 - protein, 59 aa, Artificial Sequence
  Synthetic
DEVRKLLKDVRELAREIERRLEENLRRSEELLKRIEDYLRKNLEDTRRLIEEVKELADR

SEQ ID NO: 17466 - protein, 59 aa, Artificial Sequence
  Synthetic
EEFKDRLRRLMKRIKERLEDVKRRHKELVKKARKSLEEVKRRHRKLVEDVRRTLEEEKR

SEQ ID NO: 17467 - protein, 59 aa, Artificial Sequence
  Synthetic
DEARKILEDLKRLAEESIRHLEENLRRSEKLVEDVERYAEENLERTKKLVRDVDEIIRR

SEQ ID NO: 17468 - protein, 59 aa, Artificial Sequence
  Synthetic
EEVKKRLEDLAREIRKANEDVKRRHKKLVDDVRKRLKEIEKKHRDLVRKIEEKLRDARK

SEQ ID NO: 17469 - protein, 59 aa, Artificial Sequence
  Synthetic
SEAEELLKTVRDLVEKSRKHLKENLKRSEELSRKSKEYADKNLERTKRLVKTVADILDR

SEQ ID NO: 17470 - protein, 59 aa, Artificial Sequence
  Synthetic
KKLEDELRRLVEEAKRENDEVRREHKRLVEDSERKLEKIERDHRELVDRVEKEMREKKR

SEQ ID NO: 17471 - protein, 59 aa, Artificial Sequence
  Synthetic
SDVERILEDLDRVVKESKRHLEENLRRSEKLTREVEEELKRNLKESEELVKRVEDIARN

SEQ ID NO: 17472 - protein, 59 aa, Artificial Sequence
  Synthetic
EDAKRRLRELVEKVKEDNKKVKEEHDDLVRKVERRLEEIRKRHEELVRRIRRRLEEEKR

SEQ ID NO: 17473 - protein, 59 aa, Artificial Sequence
  Synthetic
SDVEELLRRLEELLKESEKHLTENLRRSEKLVRDSKRHLDENLKRSKDLAREVVRLAEK

SEQ ID NO: 17474 - protein, 59 aa, Artificial Sequence
  Synthetic
RKVKERARELVERIKRRNEKVERDHEELAREVRERNKEVEKRHRDLVEELRRRLDERKR

SEQ ID NO: 17475 - protein, 59 aa, Artificial Sequence
  Synthetic
SEAEELLERVKKLTDESLRYLEENLDRLRKLVKESEDHLKDNLRKSEKRVREVIDLARR

SEQ ID NO: 17476 - protein, 59 aa, Artificial Sequence
  Synthetic
KDMEDKLRRLVEESRRALEEVLKRHEDLVEEVRKSNDKVRKEHEELVKRVRDALREIKR

SEQ ID NO: 17477 - protein, 55 aa, Artificial Sequence
  Synthetic
SVEERLEKLLKEAEERLRESEDRTRKLVEEVRRELEKLKKRSKELADRVREELRK

SEQ ID NO: 17478 - protein, 59 aa, Artificial Sequence
  Synthetic
EEELEKILDTLRRIAEKLVRKNEDILRRLKEIVKKVIRENEEILRRLEEIAKELAKRLE

SEQ ID NO: 17479 - protein, 55 aa, Artificial Sequence
  Synthetic
SLDEEAKRVVEEVRKRLRESKERSREIVERARRELERLKEESKRLADRIREEVKK

SEQ ID NO: 17480 - protein, 59 aa, Artificial Sequence
  Synthetic
TELVKRLLDDLRRIIRELEEKNRALNETLRKIVEEAIKKNREILEELREEVDRVRKRLK

SEQ ID NO: 17481 - protein, 60 aa, Artificial Sequence
  Synthetic
SEVEKVLREAREILKKNKRENEEVHKKSKEIAERNREKNEKVHRDSRKIIEELKELADRG

SEQ ID NO: 17482 - protein, 56 aa, Artificial Sequence
  Synthetic
EDEARKLVKEVRETLEDSARRDEKLIEDLKRTLDESKKEDDKLIEELERRLREAER

SEQ ID NO: 17483 - protein, 60 aa, Artificial Sequence
  Synthetic
SEVEKVLREAEEIAKKNEEDNRRVNDRSEKIIEENERRNRKVHKESEDIVRDLERLAAEG

SEQ ID NO: 17484 - protein, 56 aa, Artificial Sequence
  Synthetic
EEEVRKLVEKLERLLEKSKRDDEESIKKARELLRRSEEADKKLIREAEEAIRTRKK

SEQ ID NO: 17485 - protein, 60 aa, Artificial Sequence
  Synthetic
SRLEELLKKAKKLVEDVEDTNRKMLEKLRKLADDLRRINKRVLDELERLARELEDIARKI

SEQ ID NO: 17486 - protein, 59 aa, Artificial Sequence
  Synthetic
EEVLRELKKLLDEAKKKLEEIDKRLEDELRKIEDDLRRSNERVRRLLEEVRRRIKEETD

SEQ ID NO: 17487 - protein, 60 aa, Artificial Sequence
  Synthetic
DELEEMLKRLEKLARDLDRINKEVLRRVEEEVRKLEEENEEVLRTLRRLAEEVERILDEI

SEQ ID NO: 17488 - protein, 59 aa, Artificial Sequence
  Synthetic
KEVLDKLEKLLEDIARELEKSNRRLEELLKEVERRLREMDERLRKELEEVKRRLEEKRR

SEQ ID NO: 17489 - protein, 60 aa, Artificial Sequence
  Synthetic
SRVEKVLEELKELMKELDDSNRRVLEELERLVRENTRRNEEVLRRVRELAERLKDELDKI

SEQ ID NO: 17490 - protein, 59 aa, Artificial Sequence
  Synthetic
EELLRRAKELLKRIKERLEESDRRLKRLLDEARKRSEDIIRALEKLLRDVKRELEEKLR

SEQ ID NO: 17491 - protein, 60 aa, Artificial Sequence
  Synthetic
KDAERLFEDLRRLVDENREKNEKVLREIEERVERLERENEKVLRDLEDLIRRVREEIDRT

SEQ ID NO: 17492 - protein, 59 aa, Artificial Sequence
  Synthetic
EEMLRELKKLLDRAREESRRIIEELERTLEKVKERLDRTDKEIEELLKRAEEELREKER

SEQ ID NO: 17493 - protein, 60 aa, Artificial Sequence
  Synthetic
DDLERLLKEVKERIDEVKRRNEEVLKRLRELVKRNKEKNDRVLREAEKLMKKLRDIVRKI

SEQ ID NO: 17494 - protein, 59 aa, Artificial Sequence
  Synthetic
EEVLRRLRELLRTAERELEESNRRAEELLKDARRKSEEIIRRLERLLEEVDRDIKRALK

SEQ ID NO: 17495 - protein, 60 aa, Artificial Sequence
  Synthetic
DDVRELLRTLRKISEDTLRRVEEINRKLERLSRETLKRVEDINRKVKELMEEVLKELDRI

SEQ ID NO: 17496 - protein, 59 aa, Artificial Sequence
  Synthetic
EDALRELKRLVDDNETKLRRLRDTHRELLERNRTELEKLKRTHKKLVDEAEEELRKKDK

SEQ ID NO: 17497 - protein, 60 aa, Artificial Sequence
  Synthetic
SDVERLLEKLRDLSRRTVRELERINEEVREIIKTLKKELDRTNKELRDIIEEIKKELDKI

SEQ ID NO: 17498 - protein, 59 aa, Artificial Sequence
  Synthetic
EKLLDELRRLLEENEKTLEDVRRTHEELVKRAKRELEKNIEEHERLVRDVKEKLERKIR

SEQ ID NO: 17499 - protein, 60 aa, Artificial Sequence
  Synthetic
SDAEELLKEAREVSKRTKDTLDEINKDVKRISEETKKRLKKTNEEIKEIADRLRKELERI

SEQ ID NO: 17500 - protein, 59 aa, Artificial Sequence
  Synthetic
EDILRELKKLVDDNRKTLKEVLETHEELLRDNSRKLERNVERHAKLVRDIKEELKETTR

SEQ ID NO: 17501 - protein, 60 aa, Artificial Sequence
  Synthetic
SDAERLLKEVEEIARRLEKKMRETNKEVDRIVKEIEDDARRLNKELREIAERIKDELDKI

SEQ ID NO: 17502 - protein, 59 aa, Artificial Sequence
  Synthetic
EKVLKELKRRLEEIKKKLDDNLRRHKKKVDDVARELEKIVKTHRDLVEEIRRRLRKKEE

SEQ ID NO: 17503 - protein, 59 aa, Artificial Sequence
  Synthetic
SDAERLLEELKRISEETKRRLAETNKKVKKIMKELTETLTETNKKLKKIIDDLRDRIDK

SEQ ID NO: 17504 - protein, 59 aa, Artificial Sequence
  Synthetic
ERVLKELRRLLERNREELRRNKEKHKELVERIKRRLEENKERHKRLVDEARKELKEKEK

SEQ ID NO: 17505 - protein, 60 aa, Artificial Sequence
  Synthetic
KDAEELLKTLERLSRETKRRLERTNRELKEISKETEKDLERTNRKLKEIIDRLREELDKI

SEQ ID NO: 17506 - protein, 59 aa, Artificial Sequence
  Synthetic
EEMLRELRRLVEENKKRLRENIRRHERLLEENRRKLEKNIRDHERRLEKADKDLEDKRR

SEQ ID NO: 17507 - protein, 60 aa, Artificial Sequence
  Synthetic
KDAERLLEEARRIVKEADDILRELDEEVRRIVEKIKRDAERTNEEIREIAKRIRDEIERI

SEQ ID NO: 17508 - protein, 59 aa, Artificial Sequence
  Synthetic
EDVLRELRKLVEDVKRRLKEVADHHRELVRRAEEELKKNRDEHERLVREIEKELRKARE

SEQ ID NO: 17509 - protein, 60 aa, Artificial Sequence
  Synthetic
DEAERLLERVKELMERLTEEARRTNETLREIVERAERRLRELDERVRKIAEEIRRRLEKI

SEQ ID NO: 17510 - protein, 59 aa, Artificial Sequence
  Synthetic
EKVLTKLRKLLEDIRRRLEKNLKDHEELVRRVEEKLKRVREHHEELVRRIKEELDKAEK

SEQ ID NO: 17511 - protein, 63 aa, Artificial Sequence
  Synthetic
RDAEELLRTMEEITRRVKKELEDLLRTDEELSERVKEEARKLDEKLKELARDVTEKARDIKKG

SEQ ID NO: 17512 - protein, 59 aa, Artificial Sequence
  Synthetic
DEVKKELKRLIEEVRDRLKKVKDTLEKLIKENEDELRKVEEHHEKLLREIEETLERMRK

SEQ ID NO: 17513 - protein, 63 aa, Artificial Sequence
  Synthetic
EEAERLLKKAEDLSRDTARKAKELLEEDEKLVRDAEKKARELDRELEKLAEEAARAATRAKKD

SEQ ID NO: 17514 - protein, 59 aa, Artificial Sequence
  Synthetic
EEARKRAEDLIRESEKRARDAKRRAKELIDRSRKSAKEAKEHHEKLIKEARDELEKAKK

SEQ ID NO: 17515 - protein, 60 aa, Artificial Sequence
  Synthetic
DEAEKLLRELEKLSRETEKRVREIIKKDRDLSEEVRRRAERLDDELRKLVEDAERELRRI

SEQ ID NO: 17516 - protein, 59 aa, Artificial Sequence
  Synthetic
DKVRKRLEELIRESDERLKELTKELRKLIEDNRRELEKIIRHHKRRVDEVRKRMTELRR

SEQ ID NO: 17517 - protein, 61 aa, Artificial Sequence
  Synthetic
SEVEDLLRRLEEIVKRNDDELRADEERTRKIIKENKETLDRLLEDLKRILRELEKIVRDKG

SEQ ID NO: 17518 - protein, 59 aa, Artificial Sequence
  Synthetic
EEAKRRAEEKLKRLEERSREIERRLKKLNEELKRISDEVEKTAREILERIKRRIEEEER

SEQ ID NO: 17519 - protein, 61 aa, Artificial Sequence
  Synthetic
SRVEKLLDDVRKILEDNERRLRDDMRRTEEIIRKNKRDLERLKERHEEIVKRLDEIIKKEG

SEQ ID NO: 17520 - protein, 59 aa, Artificial Sequence
  Synthetic
EDARREAERLLKEVEDTSREAEKRLRELNEELERRSRKVEEELKKSDEELKRRIEEAER

SEQ ID NO: 17521 - protein, 60 aa, Artificial Sequence
  Synthetic
SIEDRLRKIVRDLEKVLRDLKREHDDVVRELEKRLRDIEERHRELVEELKKRIEEIERER

SEQ ID NO: 17522 - protein, 59 aa, Artificial Sequence
  Synthetic
EKDLEELLKELEDIIREVRKRAKENLDRTRKLIKDIEDYLKKNLDRVRKLIEDITRALK

SEQ ID NO: 17523 - protein, 60 aa, Artificial Sequence
  Synthetic
SIEERLREVERRLREDLKRLEKAHRDIVRDIERTLRKVEEDHRRVKEKLKRTIEDVERRR

SEQ ID NO: 17524 - protein, 59 aa, Artificial Sequence
  Synthetic
EKELEKLLRDLKRIIDEVRKYATRNLEELKRVLKRVKEEAEKNLERTERLIEEIRRRAE

SEQ ID NO: 17525 - protein, 60 aa, Artificial Sequence
  Synthetic
SIEETLREIVKDLERVLEEIERRHREIKKELEDILRELKKRHEDVVREAEKELRDAKRRR

SEQ ID NO: 17526 - protein, 59 aa, Artificial Sequence
  Synthetic
REELKRLLDELKKLIDRVREEAKKNLDRSKKMIEDVERYARENLRRTKELIDDVKEKLR

SEQ ID NO: 17527 - protein, 60 aa, Artificial Sequence
  Synthetic
KIEEEVDKVRRTLEKELKEIDERHKRIVEKLREELKEAEKRHEELVKRAKEELDDVKRRE

SEQ ID NO: 17528 - protein, 59 aa, Artificial Sequence
  Synthetic
EDLLRKLLEELDRIRKEVRERLKRNLDRLKKLIDEVREYLERNLRRTKKLIDRVREDAR

SEQ ID NO: 17529 - protein, 60 aa, Artificial Sequence
  Synthetic
DVEEELRELIERLKEVLDRLREESKRVIKELRDTLRELEERSRDIIRKLEETLRDVARKS

SEQ ID NO: 17530 - protein, 59 aa, Artificial Sequence
  Synthetic
DEFLRRVLERAKKIVRKLEEDARRVLEETEDLIRRLREKAERVHEKTKKIIKEITEELK

SEQ ID NO: 17531 - protein, 60 aa, Artificial Sequence
  Synthetic
SVEDALRKLIEELKRVLKKLEDDSRRIIEELRKVLKDLEDRSRKVIEEIKDDLRKIAEKS

SEQ ID NO: 17532 - protein, 59 aa, Artificial Sequence
  Synthetic
EEVAKRLLDKARDIVRTLKEEAERVHERSRRIIEELRREAEEVLEETRDILRRLREEAK

SEQ ID NO: 17533 - protein, 60 aa, Artificial Sequence
  Synthetic
SELEKVLEKLKDLLRKVREKNERVLREVEERTRRVKRDLERVLKEAKDILRKAKKLADDG

SEQ ID NO: 17534 - protein, 59 aa, Artificial Sequence
  Synthetic
EEIARRIKKVLDDWKRVSEESKRRIEELLKRDKEELEKIKRAAKKVIDELKRLLEEAER

SEQ ID NO: 17535 - protein, 60 aa, Artificial Sequence
  Synthetic
SRAEEILKRLEELIKRLKEENDRVLEENKRLIEELEKKNRDALRRIEELLKELKDIARRI

SEQ ID NO: 17536 - protein, 59 aa, Artificial Sequence
  Synthetic
EDLEEKLRRLLDELRKISEEVEERSERSNKELEDVSEDSKRKLRKILEDLRDLLRRTEK

SEQ ID NO: 17537 - protein, 60 aa, Artificial Sequence
  Synthetic
SRAERILEEMERLIEEVRKENERVLRENRRLIKELKEENERILRELKRLIKEAKEIVERI

SEQ ID NO: 17538 - protein, 59 aa, Artificial Sequence
  Synthetic
EEVDERLERLLKTAEDDSRRSDKRSEDSNRELRKVSEDSRKRLEELLKDAERKLREDEK

SEQ ID NO: 17539 - protein, 60 aa, Artificial Sequence
  Synthetic
DDVDRILEELKRLVEENRKRNEDIERELEKLIKEVEDSNRTMLERMEDLIRELRDIVRRI

SEQ ID NO: 17540 - protein, 59 aa, Artificial Sequence
  Synthetic
EDAERRLKELLEDAKRVSDEVLRRLTELLKKAKDVSDESRERLRRLLEDLERDLKRERT

SEQ ID NO: 17541 - protein, 60 aa, Artificial Sequence
  Synthetic
SDAERLLRELERLVEENRRRNKKVLDDNERLVEKLEKSNRRALEELKELVDRLEDIARRI

SEQ ID NO: 17542 - protein, 59 aa, Artificial Sequence
  Synthetic
ERVREELERLLEEAKRDSDEVRERSKKSNKKLEDVSRKSKKDLRDLLKKARDILKETER

SEQ ID NO: 17543 - protein, 60 aa, Artificial Sequence
  Synthetic
SDAEEVLKELERLIREVEERNKDILRKAKELVRDNERKNREVMERLKKLIEDLKKIAKEI

SEQ ID NO: 17544 - protein, 59 aa, Artificial Sequence
  Synthetic
EEVEKRLKDLLREAEEVSRRSEERLRELLKELEDVSREVKRRLERILEELKRILDEVEK

SEQ ID NO: 17545 - protein, 59 aa, Artificial Sequence
  Synthetic
DEVEELTERLKRVLEDNRRTAEEVKERTRRVIDKVRRDYEELEKRLKKILKEIEDLSRE

SEQ ID NO: 17546 - protein, 56 aa, Artificial Sequence
  Synthetic
EDTVRRLIKEAKDDNDRMEEENRRLIRELEEVSKRAHKRLRELIRRIEELLRREET

SEQ ID NO: 17547 - protein, 59 aa, Artificial Sequence
  Synthetic
SAEEEVRKIKREIEKVLRESEREIERVEKEIRDVLRKSEREIERVKREVDKVLEEVRRA

SEQ ID NO: 17548 - protein, 56 aa, Artificial Sequence
  Synthetic
LEDLLREVKKAIEKNEKDNRDVLREVEEKIRRDEKRNKEVLEDAKRKIEELKKRAD

SEQ ID NO: 17549 - protein, 59 aa, Artificial Sequence
  Synthetic
SAEDAIREVERKAREVLKRSKEEIDKVVKKAEEILKRSKDEVKKVADEIRRILEEVRRA

SEQ ID NO: 17550 - protein, 56 aa, Artificial Sequence
  Synthetic
LEDVLRRIEKIIRDNAEENKRVLEEAEEVLKKDEKDNRDVLEELKKILEELKRKAD

SEQ ID NO: 17551 - protein, 59 aa, Artificial Sequence
  Synthetic
SVEEAVKRLADEIRKVLERSKEELERVAKEAEDVLRRSREELKKVADEVRKVLDDVRRA

SEQ ID NO: 17552 - protein, 56 aa, Artificial Sequence
  Synthetic
LEDALRRLKEIIDENKRENEEVLKRAREIIEENKKRNKEVLDEAKEIIDRVREKAR

SEQ ID NO: 17553 - protein, 59 aa, Artificial Sequence
  Synthetic
SAEDAIRKIAEDAKKLLEDSRRELRRVVEKVKRLLEKSKEDLDRVAEEVKKVLEEADRA

SEQ ID NO: 17554 - protein, 56 aa, Artificial Sequence
  Synthetic
LEDAVREVREVLKKNKEDNDRVLREAEEVLKRNEEENRKVLEEAKRIIDELKKRID

SEQ ID NO: 17555 - protein, 60 aa, Artificial Sequence
  Synthetic
SVREELTRVKKRARDVLERSREEAERVAKRAEEVNRESEREIERVLEEVERILEDIREKV

SEQ ID NO: 17556 - protein, 59 aa, Artificial Sequence
  Synthetic
EEAVRDVLRKVREIIRRNRKENEEVLRDVERLIRELEERNRRVLKKAKEILKRIRDKAE

SEQ ID NO: 17557 - protein, 60 aa, Artificial Sequence
  Synthetic
SVEEELEKVKRKAEKLLEDSDREIKRVTKKAEKVLEDSRKAVEEVEKEVKEVLDEIRANV

SEQ ID NO: 17558 - protein, 59 aa, Artificial Sequence
  Synthetic
EKKAREVLKKVEDRIEENRRRNEEVLEKAEKIIEDNRRKNKTELDKVKEIIRRIREEAR

SEQ ID NO: 17559 - protein, 59 aa, Artificial Sequence
  Synthetic
SAEDALRKLKEDSKRVNDESRREAERLKREIEKINEDSDREVEKVKKKIEELLEKVERD

SEQ ID NO: 17560 - protein, 59 aa, Artificial Sequence
  Synthetic
ERELKRVLEEVERLIEKVKTDNKRVLDEIRKILEEIERKNRKVLKEVEDLLKTMEDEAR

SEQ ID NO: 17561 - protein, 59 aa, Artificial Sequence
  Synthetic
SLEEAVREVERKAKKVNDDSREEVKKVKKESKDVNKKSEDDARRVVEEIKKILKRIAEK

SEQ ID NO: 17562 - protein, 59 aa, Artificial Sequence
  Synthetic
ERLAKKVLDEVEKIIEDIKRRNEEVLRRVREDIKRVEEENKKVLKRVKERVEEMRRRAD

SEQ ID NO: 17563 - protein, 59 aa, Artificial Sequence
  Synthetic
EMEDEARKVIKKIKEVNRRSREESEKLSRKSERVNRESKRASEELREEIRRVLEEIRRK

SEQ ID NO: 17564 - protein, 59 aa, Artificial Sequence
  Synthetic
RRKMKTVLDEVEKEIRRIEEENKKVLKESEDLIREVEKENREVLERTKRIIDEARKRAD

SEQ ID NO: 17565 - protein, 59 aa, Artificial Sequence
  Synthetic
SVDEAVKEVEDRLRKVNEESTRESKKVVDKARDVNRKSEEASRELEDRIEKVLTDIRRK

SEQ ID NO: 17566 - protein, 59 aa, Artificial Sequence
  Synthetic
ERLAKRVLDEAKRILDEVKEKNRRVLEDSERIIKEVEDRNRRVLEETRRIIEELRKEAD

SEQ ID NO: 17567 - protein, 59 aa, Artificial Sequence
  Synthetic
SVEEMVKELIRKLREVNKRSADELDRVRKRMKKLNDDSRKAVKEVREKIERLLDAARRR

SEQ ID NO: 17568 - protein, 59 aa, Artificial Sequence
  Synthetic
ERLAEEVLRRVEKKIEDIRRRNEKVLRELEKILREVSEENERVLRDLERKLRKLAEDDR

SEQ ID NO: 17569 - protein, 59 aa, Artificial Sequence
  Synthetic
SVEDEIRKVKDELRRVNEKSTRDSKRVRDRMETVNRESEKRARDVKKRIKEVLDKIRER

SEQ ID NO: 17570 - protein, 59 aa, Artificial Sequence
  Synthetic
KRLADDVLRKVRDEIRKIEEDNREVLRRSEDILRKIKERNKKVLDDVRRKIDKARRDAE

SEQ ID NO: 17571 - protein, 59 aa, Artificial Sequence
  Synthetic
KAEEAAERIKKKLEDILKRAKEESEKILDKLREVLERSKRKHEELIRRAEEVLKDIARK

SEQ ID NO: 17572 - protein, 55 aa, Artificial Sequence
  Synthetic
RDVLTELEKIIKELEKRAKEVLDTSRKSIEDLERRNEESLKRLTDDLKRAKEEAD

SEQ ID NO: 17573 - protein, 60 aa, Artificial Sequence
  Synthetic
SEVEEVLKRLEELLRDSERKVEEMERRLKEIIDRLREEAKRVLDESKESSKRLDELAKKG

SEQ ID NO: 17574 - protein, 59 aa, Artificial Sequence
  Synthetic
EEADRALRDLERKHEKRVREVDDRLKKIEDELKRVVEEIRKRLEDLKEENRRIVDRTAT

SEQ ID NO: 17575 - protein, 60 aa, Artificial Sequence
  Synthetic
SDVDEVLKRSEDSTRRLRERAERMLEELERLIRESKRTADEVLKRSRESSKRLDEEVRAG

SEQ ID NO: 17576 - protein, 59 aa, Artificial Sequence
  Synthetic
EEVRKELERLRRENEKVVREAKKRLEDIIRKHEKIVKEIKEALDKLLEDNKRIVDRTSK

SEQ ID NO: 17577 - protein, 60 aa, Artificial Sequence
  Synthetic
DELEDVLRKAKELIKRDRDEVRRVLEELKRSTEDLRRKVRDVERRLKELIDELDDIARKI

SEQ ID NO: 17578 - protein, 55 aa, Artificial Sequence
  Synthetic
KELEKIKKELEDVIRETRERLKKVLDETREDIKDVDRRLRKLEEEIRRKVEEDER

SEQ ID NO: 17579 - protein, 60 aa, Artificial Sequence
  Synthetic
SELEEIIERIKRLIEEDRETVKEVLERLRRLSDEDRKEVKRVLREIKELIKELEDLRRRI

SEQ ID NO: 17580 - protein, 55 aa, Artificial Sequence
  Synthetic
EELERLKEEAKRVIKRTRDELEKILRENRELIDRSRKELRDLEKELRDVVRESER

SEQ ID NO: 17581 - protein, 60 aa, Artificial Sequence
  Synthetic
SVREELEKLVRELRRLLEKSKRDTDRLSEEMEELNRRAEELIRTIERRLRELLRKIRENV

SEQ ID NO: 17582 - protein, 59 aa, Artificial Sequence
  Synthetic
EKLVEELKRRAKKVIRELEELSRRATEEVKRVLKENEDLVREVEKDLEEILKRIKDRAD

SEQ ID NO: 17583 - protein, 60 aa, Artificial Sequence
  Synthetic
SLEEELKKLEEEVRRLLEKSKEDTDRLKKEIEDLNKKAEDDVREIRKELEKLLRDIARNV

SEQ ID NO: 17584 - protein, 59 aa, Artificial Sequence
  Synthetic
EELAKRLSDKFRRILEKLEEDSKRALDKAREILKRNEELLRELLEELRRILEEIERRAR

SEQ ID NO: 17585 - protein, 60 aa, Artificial Sequence
  Synthetic
KAKEELDRLRKEARDLLEDSKTKTKRLVEEMDKVNEDSKRESKKLLDELEKLLRDIEKRV

SEQ ID NO: 17586 - protein, 59 aa, Artificial Sequence
  Synthetic
DKLVEKLREEVERILERVKELSKKAIDEVKEVIKRNRDLSKRVIERAKEILRRIEEKAR

SEQ ID NO: 17587 - protein, 60 aa, Artificial Sequence
  Synthetic
SVEDELRRIEEEMKRLNEKVERDSRRVLKEVEDLNREIKKRSDDLEREIRRLLEEVKRRK

SEQ ID NO: 17588 - protein, 56 aa, Artificial Sequence
  Synthetic
IRELLKELRKILDDNRETARKVLEDSKRIIERNKREAEKLERRSRKILKDIEDEAR

SEQ ID NO: 17589 - protein, 60 aa, Artificial Sequence
  Synthetic
SVEEELRRLEKRIEELVREIERRLRELKKEVEELNERIKRASDEILDRIRRLLEEVRRRK

SEQ ID NO: 17590 - protein, 56 aa, Artificial Sequence
  Synthetic
VRDVLREVERIIRELEERARDLLRRIREIIRRNEEKLERLLRRSKEILKEIEERAK

SEQ ID NO: 17591 - protein, 59 aa, Artificial Sequence
  Synthetic
STERKLEELEKEAEKDLKEVEDRLKELNDHHDKRVKEVEDRLRRANKHHRDRLEDIRRR

SEQ ID NO: 17592 - protein, 56 aa, Artificial Sequence
  Synthetic
TDEVLKRLKDLIKELRDEVRKVLTEHREIDKRVEEEVKRVLDEHREIDKRLDEETK

SEQ ID NO: 17593 - protein, 59 aa, Artificial Sequence
  Synthetic
SSKEKIERLREKLEDLVRRVRKRLRELNEHHKELVKRIEDTLRELLRHHDELLKEAERR

SEQ ID NO: 17594 - protein, 56 aa, Artificial Sequence
  Synthetic
TEDVLRRIEELIERLKREVDRVEREHERIDEEVRKRAEDIERRARDIDREVKETTR

SEQ ID NO: 17595 - protein, 59 aa, Artificial Sequence
  Synthetic
SVRETLERMLRHHAELVERVRRELRKLNKHHRDEVKRVEERLDELRKHHEELLRRAEKD

SEQ ID NO: 17596 - protein, 56 aa, Artificial Sequence
  Synthetic
AKKVVEDLRRINERVKDEVRRALREHERIDKEVREIVEEIERRAEKIDEELKRTID

SEQ ID NO: 17597 - protein, 59 aa, Artificial Sequence
  Synthetic
SVEEALTEIKKRLDKKVEDIERELKKLLDHHKELVDDVRRKLEELNRHHDRLLDEIRKD

SEQ ID NO: 17598 - protein, 56 aa, Artificial Sequence
  Synthetic
KDEVLKRLEDLIRELDRRVKEIEKRAEEIDRELEDRVRKVLDEHRKIDERAARETD

SEQ ID NO: 17599 - protein, 59 aa, Artificial Sequence
  Synthetic
ETKERLDEILKHHEEEVKKVRKRLDELLRHHEELVKEVDKRLKEMNDHHRRLLDEADKD

SEQ ID NO: 17600 - protein, 56 aa, Artificial Sequence
  Synthetic
KDDVLRRLEDINRRLEERVRKAERRLEEIDEKAERITEKVKREHEDIDRRVEDIKR

SEQ ID NO: 17601 - protein, 59 aa, Artificial Sequence
  Synthetic
SVKERLDEVRRHHEDEVRRVDEKLKEILRHHEEEVRRVDKELKELLDHHKELLDDAERR

SEQ ID NO: 17602 - protein, 56 aa, Artificial Sequence
  Synthetic
AEEVKKRLDDINKRVEEIVREIEERLRRIDEKLKEIVRKAAEDIRRIDKEVEDEIR

SEQ ID NO: 17603 - protein, 60 aa, Artificial Sequence
  Synthetic
SLEELLKKIEERLRDLSRKVAEELKRILDELRELSERAKDLNRRVNETLRKLVEDITRRD

SEQ ID NO: 17604 - protein, 59 aa, Artificial Sequence
  Synthetic
EEDVKKVLDELEKLLKDNEELNRRVRKELKDLLETLRKLNERSKEELDKLIKELEDRAR

SEQ ID NO: 17605 - protein, 60 aa, Artificial Sequence
  Synthetic
REVEEILRKLKEITDRTRDLSRRNEEELRRIIRELEEMSKRNKREVEEIIKEAKELAKRT

SEQ ID NO: 17606 - protein, 59 aa, Artificial Sequence
  Synthetic
EKAREDLDRLRRENEELIERSERINKKIKEELERVIKRSEDLNKKLEEDLEKLIRDETR

SEQ ID NO: 17607 - protein, 60 aa, Artificial Sequence
  Synthetic
EEVERILTKAERVTRETERLSRENEKELKKITDETRRLSEKNIEDIERIIEEMERLARTT

SEQ ID NO: 17608 - protein, 59 aa, Artificial Sequence
  Synthetic
EDARRELKRLEEENRRLLEESEERNRRIEERNEELIEESERRNRELEKRLRDLIKETRD

SEQ ID NO: 17609 - protein, 60 aa, Artificial Sequence
  Synthetic
SAEDSIRRAEEEARRLIKRAEEEAEKSARRHKELNERARKRAKESAEEAEKLIREAARSG

SEQ ID NO: 17610 - protein, 56 aa, Artificial Sequence
  Synthetic
ARDLEEKAKKALEKAERIARKNAEDNERNLEKSKRIAERNAKKNEEALREIAKKAN

SEQ ID NO: 17611 - protein, 59 aa, Artificial Sequence
  Synthetic
SAREDIERLVKELKELVERAREAIKRSAEEHKKLNKELKDRIKEVVERLKKLIDDARRD

SEQ ID NO: 17612 - protein, 56 aa, Artificial Sequence
  Synthetic
AEELLKKAKRVIEKAEKILRENKEENERNLATSEKIARDIEDKLRKVLKRIADEIR

SEQ ID NO: 17613 - protein, 59 aa, Artificial Sequence
  Synthetic
SAEDKLREVEKHHEKLVRDIRRKLEKNLRDHAEKVDRVRKKLEEAERRLKELVDRVRKD

SEQ ID NO: 17614 - protein, 55 aa, Artificial Sequence
  Synthetic
ERVDRDLERLDREVEEIARRLTRLMEESNKRLEDIVRTIEERIKEILERLKRTAK

SEQ ID NO: 17615 - protein, 60 aa, Artificial Sequence
  Synthetic
SDVEKIIKDLEKVIDDNRRTNEKAIRDAEDIIRRSEEHSRKVIEKLKKIIKEVKEEAERL

SEQ ID NO: 17616 - protein, 56 aa, Artificial Sequence
  Synthetic
EEEVRRVEEEIKKLLEDSRRLLRRIEEESRRLDEEDERLMKEIDDEIRELLERIRR

SEQ ID NO: 17617 - protein, 60 aa, Artificial Sequence
  Synthetic
KEVEDIVDEARKRIDTVRKESKRVVEEVERRIEENKRRNEEVIKRVREDIDRVRKEADKL

SEQ ID NO: 17618 - protein, 56 aa, Artificial Sequence
  Synthetic
REELERLRREVEKLEEDDRRLLEELEKRARELLERSKKLLDEIRREMEELLKRIRT

SEQ ID NO: 17619 - protein, 61 aa, Artificial Sequence
  Synthetic
KEVEDIIREVEKRIRDSERHSKEVLDRAEEVIDDNRRKNEEVIKEAEEIIDRIRREADRLK

SEQ ID NO: 17620 - protein, 56 aa, Artificial Sequence
  Synthetic
KDLLKEVEERSRRVIEKDRELLKRLEDKVRKLVEDSRRMVKRIEEEIRKLLEDIRR

SEQ ID NO: 17621 - protein, 60 aa, Artificial Sequence
  Synthetic
SELEKIIEDIKRLIDELRKLVEDVERRNRKLSEDDKRLVEEVLKRLDELIRRLREIAKKI

SEQ ID NO: 17622 - protein, 55 aa, Artificial Sequence
  Synthetic
ERLDELRERLKRLEDEVRRRLEELERENRKIIEETEEALRRIEEKARKELEEVDR

SEQ ID NO: 17623 - protein, 60 aa, Artificial Sequence
  Synthetic
SELDDIIRKIEELIRDDERKVRKAVRENEDLSRRDEERVRKVIDEARKLLKRLEEIAREI

SEQ ID NO: 17624 - protein, 55 aa, Artificial Sequence
  Synthetic
EKLDELRKRLEDLIRETEKELRRLERENDEIEKRTEDLLRRLREELRRIVEEVER

SEQ ID NO: 17625 - protein, 60 aa, Artificial Sequence
  Synthetic
DDLERIIEEIERLIRTLEELVRDALRKSKRLLEENKKLNEEVLRRIKDLIRRLEEIARRI

SEQ ID NO: 17626 - protein, 55 aa, Artificial Sequence
  Synthetic
EELDKLREELKRLVDRVEEMLRKSEEDTERIIRKSEEDLERLERDLKRLVEEVRR

SEQ ID NO: 17627 - protein, 60 aa, Artificial Sequence
  Synthetic
KELEDIIREAEKLIEENSRKNKEMLDRSKELIERNERKNRDVIRRLEELIEDLRRIAEEI

SEQ ID NO: 17628 - protein, 55 aa, Artificial Sequence
  Synthetic
EELDRLRKKLEDNIRESEKELRRSEEETKKLIDDSERELERIERRARELLERVRR

SEQ ID NO: 17629 - protein, 60 aa, Artificial Sequence
  Synthetic
SDVEDLLRKIKKILREIAEESKRTVRENEELTDRVKKKIREIVERIRRIIKELEERLRRI

SEQ ID NO: 17630 - protein, 59 aa, Artificial Sequence
  Synthetic
KDVEDKLRELERELKKIEDDSRRLLKRLEEENRTLVKEVRERLKRLEDDVRKLKEDVTT

SEQ ID NO: 17631 - protein, 60 aa, Artificial Sequence
  Synthetic
DEVDKLVEEIKKIIEDVRRESDKTVRDNEELTKKLAEDSKRSLDEIKKLIEELRKEIERI

SEQ ID NO: 17632 - protein, 59 aa, Artificial Sequence
  Synthetic
EEVERKLKKLKEELERLVEESRRKLEELKKRNEELVRRSREELDKLRREVKETLERVKR

SEQ ID NO: 17633 - protein, 60 aa, Artificial Sequence
  Synthetic
SDAEEILKEIERLIREVEKTSRRTVEEDERVTEEVRKKSEKSVRDIEELLKEIKRELEEI

SEQ ID NO: 17634 - protein, 59 aa, Artificial Sequence
  Synthetic
ERVERKLEELKRRLEELEKESERELDRLRKENEDLVRRSEEELRRLRRELEEIVREARE

SEQ ID NO: 17635 - protein, 56 aa, Artificial Sequence
  Synthetic
SEAEKVLKEVEDIIREVEEENRRLIREIEEEIRRVKEEVERLLRKSEKDIKEVEES

SEQ ID NO: 17636 - protein, 56 aa, Artificial Sequence
  Synthetic
EKLLREIERRMRELEKTSRKLLKEIKKKAKELKEKAEEVLRRSRKRTEELVDRLRK

SEQ ID NO: 17637 - protein, 60 aa, Artificial Sequence
  Synthetic
DVEDLIRELRKRLDELRKESEELLRRSKRKHEKLLTDSRKLLRDIEREARKLLEDVKRKG

SEQ ID NO: 17638 - protein, 59 aa, Artificial Sequence
  Synthetic
REMIETLIRKAKEIIDRLREENRRAVRRSDETLRRLKEENDKVITDVKRKIKELRDEVK

SEQ ID NO: 17639 - protein, 60 aa, Artificial Sequence
  Synthetic
SIDEEITRLEEESRRDEEESKRLLEKSRDDHRRLLERSEKLLRELEKRARDLLEDVKRKG

SEQ ID NO: 17640 - protein, 59 aa, Artificial Sequence
  Synthetic
EEMVRRVIEKYERAVERSTEENRDAFRRSEETIRELAKENEDAIREVKEIIDKLREDVR

SEQ ID NO: 17641 - protein, 60 aa, Artificial Sequence
  Synthetic
DVEELIKELERRLRKLLEDSRRLLEESRREHKKLIDDSRRLLDELRRRLERLLEKVRRRG

SEQ ID NO: 17642 - protein, 59 aa, Artificial Sequence
  Synthetic
REVIEAVIRKAEDIIRRLRRKNEKAVEESRENIKEIKRENKRVIDEAREIIKRLEEELE

SEQ ID NO: 17643 - protein, 60 aa, Artificial Sequence
  Synthetic
SVEDLLRRLEEESRKDLDDSRRLLDESRKRHEDLLRKSEELLRELEERLRRLLEKVKKKG

SEQ ID NO: 17644 - protein, 59 aa, Artificial Sequence
  Synthetic
EDVIRKLIEDYERLVKESTDRNRRAVEKSRENLKRLDKENRDVIEKARRIIEELEKEVK

SEQ ID NO: 17645 - protein, 59 aa, Artificial Sequence
  Synthetic
SVDELIEELRRRLEKLLREAEELLKESRKRHEELKKRSKELLDELEREVERVLEELRRK

SEQ ID NO: 17646 - protein, 59 aa, Artificial Sequence
  Synthetic
EEVIERVIRKADEIIKRLKKELREVVERSKENIKKLEEENRRVIKKAREELRKIEEEIR

SEQ ID NO: 17647 - protein, 60 aa, Artificial Sequence
  Synthetic
SEVDEVLKTLKELIERLRERVKEVLKRLEKLLKELEDLSRETVRELRETNDDLRRKAEKT

SEQ ID NO: 17648 - protein, 56 aa, Artificial Sequence
  Synthetic
REAAEKVRRDVDRLRKEVEEMLERVKRKLDELRKDSDRLAREVEDSTRKIERDVEK

SEQ ID NO: 17649 - protein, 61 aa, Artificial Sequence
  Synthetic
SELEEMVKKVKEIIDRARERIRELIERHKELDRESRKRIEDIIREARELNKDVKRVIKEIK

SEQ ID NO: 17650 - protein, 56 aa, Artificial Sequence
  Synthetic
DEALEELKRRVKRLEEKLREDIKRLRENNERIREDVERLAEELDRHTRKLMEEVKK

SEQ ID NO: 17651 - protein, 60 aa, Artificial Sequence
  Synthetic
SELEDIVEKAKKIIEDVRRRIEKLIRDDKRLNDESKKTIEELIRKARKLNEEAERIIRKI

SEQ ID NO: 17652 - protein, 56 aa, Artificial Sequence
  Synthetic
RELLEKLRRDVEELEREVRELLERLKENSKRIEDEVRELMKELKRHTEELEREAER

SEQ ID NO: 17653 - protein, 60 aa, Artificial Sequence
  Synthetic
RELEEIVERAKEIIRRVAEKIKKLIEEAERLDRDSKRKIDELIEKVKKLNEDVRRTIEEI

SEQ ID NO: 17654 - protein, 56 aa, Artificial Sequence
  Synthetic
EEMLRRLTELLKELADEVKKLLDRLKENNEKIREDVERLLRELEEHTKKLEEDVTR

SEQ ID NO: 17655 - protein, 60 aa, Artificial Sequence
  Synthetic
SEEERVLKELEDVLREHKRKADESSRKLEEVHRRHRKRMEESKRELEEVHKEAKDRITKN

SEQ ID NO: 17656 - protein, 55 aa, Artificial Sequence
  Synthetic
EELEDVERKARELEERNKKLLKDSEEATEELRRENEEMLEESKRRTEKLEREVRT

SEQ ID NO: 17657 - protein, 57 aa, Artificial Sequence
  Synthetic
DKVREVLRESEKLLEDWDRELKEVLKDFKRTLDELEERLRDVLRKNKKSLEDLKRRG

SEQ ID NO: 17658 - protein, 55 aa, Artificial Sequence
  Synthetic
DRIMRELRELNRRLDESVKEIRDRLRRILDKLRKMIEKLKKELEDTDRELEERVR

SEQ ID NO: 17659 - protein, 57 aa, Artificial Sequence
  Synthetic
SKAEEVLKTSEKLLEEWRRRVKEVEDRNEETIKRLKEELDRALKENEESLRELEKRG

SEQ ID NO: 17660 - protein, 55 aa, Artificial Sequence
  Synthetic
DRISEELKKLNEELERELRKLSEELKEVDREAKEEIRRLVEELREIDKRLEEETK

SEQ ID NO: 17661 - protein, 57 aa, Artificial Sequence
  Synthetic
SEAEKVLTDFRDALEKDRERNERVLRENEETIRRDKEENERVLRENDKSLKELRKRG

SEQ ID NO: 17662 - protein, 55 aa, Artificial Sequence
  Synthetic
DRIKKTLERLLRESKKASEKLKDDLRKLDKRSKEESRRLTERLREIDEELRRRVD

SEQ ID NO: 17663 - protein, 57 aa, Artificial Sequence
  Synthetic
SEAEDVLRRFEEELRRDDEKNERVLRRNEETNRRDDETNRDVLRRNKESLDKLRKRG

SEQ ID NO: 17664 - protein, 55 aa, Artificial Sequence
  Synthetic
KRIKDELRKLLKRSEERSEELRRRLEDLDRRSKETSDKLREELERLDRDVERKVN

SEQ ID NO: 17665 - protein, 57 aa, Artificial Sequence
  Synthetic
SEAEKVEDDVRRVLETDEKKNRDVLDTNRRTIEEDRKRNEEVLRKARKMLEDLKRRG

SEQ ID NO: 17666 - protein, 55 aa, Artificial Sequence
  Synthetic
ERLRETLEELLRRSDERSRRIMEDLKRLDTDSKRVSEELKRRLEELLKDLERKVR

SEQ ID NO: 17667 - protein, 59 aa, Artificial Sequence
  Synthetic
SEVDEITKELEESLKDLDRVVRELREKIKKIDKELAETVDKLTEEAKEILKTLRDIIRR

SEQ ID NO: 17668 - protein, 62 aa, Artificial Sequence
  Synthetic
KKLKEKVDRVHKRHKDRLDEIKRKLKKVLEDNRETLERIKRKLRKVLEDLKRMLDELERELR

SEQ ID NO: 17669 - protein, 60 aa, Artificial Sequence
  Synthetic
KETEDLVRRLRKVLKELEERVRTLMRDNERVNKEIADKIRRLREKLREEDERVDEVVKRR

SEQ ID NO: 17670 - protein, 55 aa, Artificial Sequence
  Synthetic
REVLREMDERVKELEERLERVLRKSKTDADRWRRELKRVLEEHDKTVKEIREKTR

SEQ ID NO: 17671 - protein, 61 aa, Artificial Sequence
  Synthetic
KEKDEVVKRYEDRIKEIRERLKEVVTEHEDRLRKWRKDLEEVVERNRRSIKKIDEEVKRRG

SEQ ID NO: 17672 - protein, 55 aa, Artificial Sequence
  Synthetic
EDVVRKLDEDLKRNEDHLEEVRKELERLNEEIEKLIRDLLEILRRIDKELRDKLE

SEQ ID NO: 17673 - protein, 61 aa, Artificial Sequence
  Synthetic
DEEKDVTRRVREVIKRLEEELEEVVRRHRESLKRLKERLEEVVRRNRKSIREIEKEVKDAG

SEQ ID NO: 17674 - protein, 55 aa, Artificial Sequence
  Synthetic
EDVDRELARMLEELRDLLRRLAEELKRIDEELEKELRDVARELEKIDRDMREELR

SEQ ID NO: 17675 - protein, 61 aa, Artificial Sequence
  Synthetic
DERKEVEERYRREIERIKTKLKEVVKRHEDSLKKIEDDLEEVRRDNERSIKEIREEVRKKG

SEQ ID NO: 17676 - protein, 55 aa, Artificial Sequence
  Synthetic
EDVDRELKEDLERNERHLEEVTRRLRKIDKDLKEKLKRLEEELKKIDREARERLR

SEQ ID NO: 17677 - protein, 60 aa, Artificial Sequence
  Synthetic
KEIEDVKRRLEELDRRIKELVDRVRRKLEEVDTRAEKELRDVRRRLEELLERLEELIRRG

SEQ ID NO: 17678 - protein, 58 aa, Artificial Sequence
  Synthetic
KELRDVIKENEDTLRRLKEEVEKVTKENEETLRRIERELDKVERDVERRIRELEEERR

SEQ ID NO: 17679 - protein, 57 aa, Artificial Sequence
  Synthetic
SEVEKVLEDNKRSIDRLEEELRKVTRTSRELLKEWAKRLEDVLRDVKRAVDELETRG

SEQ ID NO: 17680 - protein, 59 aa, Artificial Sequence
  Synthetic
SDEIRKLKEELKRLDEEAARILETIMRRNKDLNDRLREIIETLKKRLKDLLKEVEDRAR

SEQ ID NO: 17681 - protein, 60 aa, Artificial Sequence
  Synthetic
DAEKLREDVERTLRRLRKELKDSIKRNREELERLERKLRKSIKETEDEVRKLEEKLERRL

SEQ ID NO: 17682 - protein, 55 aa, Artificial Sequence
  Synthetic
DDVRRLVEKIEREVRKLIEDHKKKSEDIVRTVEKLIEDHKRRVDRISEEVEEELR

SEQ ID NO: 17683 - protein, 61 aa, Artificial Sequence
  Synthetic
SKEDLKRKVKKILEDVERELRRSIEDTERLLREVEKRLEDSVRENRRKLREVEEKLRRRLK

SEQ ID NO: 17684 - protein, 55 aa, Artificial Sequence
  Synthetic
RRVDELVKEIEERARKLIKEHRDRVRELLRELEELIERHKELSERILKELEELLK

SEQ ID NO: 17685 - protein, 58 aa, Artificial Sequence
  Synthetic
SEKEEIARRLEKVHREHREELKRLEDRLREVLKRNRETIEDIRRKLEEVLRRLRERLV

SEQ ID NO: 17686 - protein, 56 aa, Artificial Sequence
  Synthetic
EEKLRRDVERIVKEAEDTLRELERVVRELEKEVRETDKRLDERVKELEEKVRRAAK

SEQ ID NO: 17687 - protein, 59 aa, Artificial Sequence
  Synthetic
SEEEDARRLLEEVERALREIKKRLKELLERHRRAVEELKKRAEDLLDEHRRAIERIADE

SEQ ID NO: 17688 - protein, 55 aa, Artificial Sequence
  Synthetic
EEIKRRLKELAKDLRRAIKEVKERLKESHDELKRAIEDVKRKLEELDEKLKRDED

SEQ ID NO: 17689 - protein, 57 aa, Artificial Sequence
  Synthetic
SERERVERSVEELIRRYREVLEESERRNRKLLKRYEDALKKSREDNKRLLDELRRAN

SEQ ID NO: 17690 - protein, 56 aa, Artificial Sequence
  Synthetic
REDAERLLERIERHLRRSEKTSEELNRRLEDHARRSIEESKKLNEELERKLRELER

SEQ ID NO: 17691 - protein, 57 aa, Artificial Sequence
  Synthetic
SSEETLRDINRKISKAIEEIEREAREIDRELRKAVEDLKREAEEIDERVREVIERIG

SEQ ID NO: 17692 - protein, 62 aa, Artificial Sequence
  Synthetic
TEVKKVLDKNEELLKRWEDRLREVLERNRKTLREIERELEEVLRKNRESIKKLKRELEEASR

SEQ ID NO: 17693 - protein, 57 aa, Artificial Sequence
  Synthetic
SSEEDLKRIDDELDKMVKDIERKIRRIDTELERVVKELKEDIERSLERLREVVERIG

SEQ ID NO: 17694 - protein, 62 aa, Artificial Sequence
  Synthetic
RDVRRVLDENRKTLEDLKRKLKEVLDRNRETLKRIEKELREVHEKHNRALDELRKELEDRRR

SEQ ID NO: 17695 - protein, 57 aa, Artificial Sequence
  Synthetic
SVEEEAEDILRRLDKTVRDLEREAEKIDEDLERVVRKLEEELRRSLEELRKVVEEIG

SEQ ID NO: 17696 - protein, 62 aa, Artificial Sequence
  Synthetic
RDVTRVLRKAERVLKEIEEKLRDVLRRNRETLKRIEDELERVHRDHNRKLKRLKEELDERRR

SEQ ID NO: 17697 - protein, 56 aa, Artificial Sequence
  Synthetic
DEDRDVEEKIKKIIKAAEDVNKESEERITELKKRLREIHERSERLIRRIEEEAKKK

SEQ ID NO: 17698 - protein, 56 aa, Artificial Sequence
  Synthetic
KKKLDEIIERLRKLLEDLEERNRRVIKELEDLIKENEELNRKVIRDLEKLVEDAER

SEQ ID NO: 17699 - protein, 55 aa, Artificial Sequence
  Synthetic
DEEDEVRKRVEESERESRKLLTDVKREADRLKEHDKRLLDEVKKLLDKIREDLKK

SEQ ID NO: 17700 - protein, 60 aa, Artificial Sequence
  Synthetic
REELKRELDRIIEELKELNKRLEERLRELIRDWERVSRELAERLKRIIDKARRLLEEVAR

SEQ ID NO: 17701 - protein, 57 aa, Artificial Sequence
  Synthetic
DEVEELLKELKDLSRESVRELRRLDEELKDLSRRSLKRLTDLDEELRREVEERRKEN

SEQ ID NO: 17702 - protein, 55 aa, Artificial Sequence
  Synthetic
ERLKKLADDSRKRLRDVERHHEKLVEDSERRLKTIKDHHKKAVEDIRRDLRETKR

SEQ ID NO: 17703 - protein, 56 aa, Artificial Sequence
  Synthetic
SEIDEVLKEIKRIIDELRERNRKHNEEVKDRIRRLEEELRKDLKDLKEIVERLAKS

SEQ ID NO: 17704 - protein, 58 aa, Artificial Sequence
  Synthetic
EAADRARELEKELKDISDTSRKSNEELRKRLEEIKDRVRKEIEKLLRELEEIVKEKRR

SEQ ID NO: 17705 - protein, 60 aa, Artificial Sequence
  Synthetic
DEEKETIKRHRESVREAERRLRDTLRRNRELVERLKRTLEDILRKHEKLVEELEEMAKRG

SEQ ID NO: 17706 - protein, 55 aa, Artificial Sequence
  Synthetic
EELKESHKDLKKIHEDAERRVRESHTDLRRIIEKVKEDLERSHRKLKRIADETRK

SEQ ID NO: 17707 - protein, 57 aa, Artificial Sequence
  Synthetic
SEMEEVLERDERKVRELEREIEKNLRDHKDEVRRLREDLERVLREDEKLVRELRKKN

SEQ ID NO: 17708 - protein, 59 aa, Artificial Sequence
  Synthetic
EELEDRMRRSSKRLEEVLRESEERLKRSDEDLRRVIDEIRRRLEESTRRLEETIKELKD

SEQ ID NO: 17709 - protein, 60 aa, Artificial Sequence
  Synthetic
SEREEVLKDIRRLLDEVRRRIEDLLEKLRRLNEEVKEKVKESEKRLRDLMRKAKELMKRG

SEQ ID NO: 17710 - protein, 55 aa, Artificial Sequence
  Synthetic
EDIKRLIEELEKLLKEAKEKAEDLTREHDDTLKKIRERHKEIIKDIEDKLDTDRQ

SEQ ID NO: 17711 - protein, 60 aa, Artificial Sequence
  Synthetic
DEEEELKKKLKAILEDLKREMREHEEKLRRSLERVARTAERHKETIKRIIDRLRKEAEDV

SEQ ID NO: 17712 - protein, 55 aa, Artificial Sequence
  Synthetic
EEVKRIAEDIKRVLEEIRKRSREILEEVKRLHKKIKDDSRKLLKDLEKLVREIRK

SEQ ID NO: 17713 - protein, 56 aa, Artificial Sequence
  Synthetic
SVEDEARRLEEKLRELTKRAREALEESNRRHRKSVEEVRRSLKKNHEKLEELARRV

SEQ ID NO: 17714 - protein, 55 aa, Artificial Sequence
  Synthetic
ERLLKELEDLIEEVERELRRVLTESKRLNEELRKRVKEIEERSEELIERLDREVR

SEQ ID NO: 17715 - protein, 56 aa, Artificial Sequence
  Synthetic
SMDESMETLTRELEDLLRKVEKKLRDSNEHHRELLEEVKRRVEENHKELDELLRRA

SEQ ID NO: 17716 - protein, 55 aa, Artificial Sequence
  Synthetic
EELLTKIRKLIRDVEETVREAERESRALDERLERTVRDVEEKSKRLIEELRRRAD

SEQ ID NO: 17717 - protein, 56 aa, Artificial Sequence
  Synthetic
DAEEEIRRIDKHHEENVRKAEEDIRRLIEHHKENVERVDRELRKIIREVEEVIRRV

SEQ ID NO: 17718 - protein, 59 aa, Artificial Sequence
  Synthetic
ERLVRELIRRLERTDEEHHKKVRRILEELKRIDEEHHRLVRRILKALKDIIKRLREEVK

SEQ ID NO: 17719 - protein, 56 aa, Artificial Sequence
  Synthetic
SLEEEIEKIERHHRKLVEEARRELKRLEDKLEKLNRDSRKRLKELAERLKKLIDEI

SEQ ID NO: 17720 - protein, 59 aa, Artificial Sequence
  Synthetic
ERVARRVLDELRRLNEKLRRMVEELVKEIERLIKKVKDDSEDVMRKLKELLKRLEDRAR

SEQ ID NO: 17721 - protein, 59 aa, Artificial Sequence
  Synthetic
REKEELLERLKKVLERTERVIRDLERRLREVLERSRKLAEDLVERLERSLKTLEKLARE

SEQ ID NO: 17722 - protein, 55 aa, Artificial Sequence
  Synthetic
EELREIYKRHEDLLRTAEERLRKVYDDHRDLLRKIDEDLKRLKERHEELLREIRR

SEQ ID NO: 17723 - protein, 60 aa, Artificial Sequence
  Synthetic
EEKDRLKKRLEELNREHEELVRRISERVRRLLEKAEREIRTLKKRLDELNKELEEIIRRD

SEQ ID NO: 17724 - protein, 59 aa, Artificial Sequence
  Synthetic
EKVKKELEDVERHSRDSSRRVKEELERLKEELDRRLRKVKEDLERVKRHSKKLVDDAKR

SEQ ID NO: 17725 - protein, 61 aa, Artificial Sequence
  Synthetic
SEREDLRRELEELLREHEEVVKEVKRRLEELLREHEEIVRELTERLKTINEDLKRVIKRDK

SEQ ID NO: 17726 - protein, 59 aa, Artificial Sequence
  Synthetic
EEAEKELRDVAKRLRESSREVRETVRDVADKLRESSKKLEEELRRVKKHSKKLLDEAKK

SEQ ID NO: 17727 - protein, 59 aa, Artificial Sequence
  Synthetic
SLEDLLRKVEEDAKRSIEKLEKDLKRVEDKHRELVERVKRRLDDVRRKLEEIIRDAERK

SEQ ID NO: 17728 - protein, 59 aa, Artificial Sequence
  Synthetic
ERVVREVLDELRKLLDDHNKKVKTVLDELKRSLDKLREEVKKVEDKLEEILKTLKETVR

SEQ ID NO: 17729 - protein, 55 aa, Artificial Sequence
  Synthetic
SLEELIREIEKELDDLLREHEDLLRKIKEEIERLIREARELIKRLEEENEELRRN

SEQ ID NO: 17730 - protein, 59 aa, Artificial Sequence
  Synthetic
EEEVKREIDRVRRVIEELRESVERLREEVRETLRRLKEHVKKDVEDHKETVKEVERRTR

SEQ ID NO: 17731 - protein, 56 aa, Artificial Sequence
  Synthetic
DTEDLIREIRRRLEESVRENKELLDRLRERLEESIKRNEDLLKRHRENSKRIADRV

SEQ ID NO: 17732 - protein, 58 aa, Artificial Sequence
  Synthetic
ELVKEMIDRLRDLLRRHKEESKRLVEEVKKLLDRHREESERLVRELDKMNKDLEDRAR

SEQ ID NO: 17733 - protein, 55 aa, Artificial Sequence
  Synthetic
DTKELLDELRKRLEDSARRVEELEKRVKDELERLKKRSEELLDEIRKRMKDVRDR

SEQ ID NO: 17734 - protein, 56 aa, Artificial Sequence
  Synthetic
KDELVRRLDETLKDHDRKLKELVDEAKELLRRYEEESKRLKRELDEILRRVREEAK

SEQ ID NO: 17735 - protein, 60 aa, Artificial Sequence
  Synthetic
REIEEVRKKVEKILRDYDKVVKDIVEKVRRILEEYRRKSEKLTREIEEILRRLREVIKRD

SEQ ID NO: 17736 - protein, 56 aa, Artificial Sequence
  Synthetic
EDSLREIRKEARRLHEKSKKLLDEIRKRAEDLERETKKLLDDIKRELEDVVRELEK

SEQ ID NO: 17737 - protein, 56 aa, Artificial Sequence
  Synthetic
RELEELLKRAEEVIKELKKSIDTMKEENDRLITELAKRVEDLKKRNDDVLERLKKD

SEQ ID NO: 17738 - protein, 56 aa, Artificial Sequence
  Synthetic
EEVLKEIDKRLKELEKEHEKVNRESEKRLEELLRRVEKVNRDSERELERLREERET

SEQ ID NO: 17739 - protein, 57 aa, Artificial Sequence
  Synthetic
SEIEEVLERAERLLRRVAEALRRTTKELEDLNREVADLLRRTTEKAERLIRRVKSKI

SEQ ID NO: 17740 - protein, 56 aa, Artificial Sequence
  Synthetic
VEELKRVADEVVKKADDLVDEDRKLAKDSVDELRRLVEKDEKLAKDVVEEVEKLAE

SEQ ID NO: 17741 - protein, 60 aa, Artificial Sequence
  Synthetic
SLEDAVRKARELIKRAEDILRRAVEEAKKLHKRSKEILEKAVEDAKRLYEEAKDAARKAG

SEQ ID NO: 17742 - protein, 56 aa, Artificial Sequence
  Synthetic
AKTILDKAREVAERVARLARKLLEDSRKVARESAELAKRLLEYAKKSAEDAKRKAK

SEQ ID NO: 17743 - protein, 60 aa, Artificial Sequence
  Synthetic
SIDEVLKELEDVARKSKEKNKRVHDDDERVVREVHKENRRVLRELEEMAERVRRELEKRG

SEQ ID NO: 17744 - protein, 60 aa, Artificial Sequence
  Synthetic
EEKVVRRVKDIARHNLELADRSVEESRKSVKENKDLVDRSVKKVEDLVRELKRLVDEIKR

SEQ ID NO: 17745 - protein, 60 aa, Artificial Sequence
  Synthetic
SIDEALTRLERAVEESHKRNEDVHRRDEEAVREVHKRNREVVKKLEDEVRKVIERLRRRG

SEQ ID NO: 17746 - protein, 60 aa, Artificial Sequence
  Synthetic
EEEVVRRIDELVEHNKDLVRRSVDESDKSVETNKDLVEKSVRRVDKLVKDLRRLVDEIER

SEQ ID NO: 17747 - protein, 60 aa, Artificial Sequence
  Synthetic
KIDEALKRLREVVKRSHEENEEVHKEDEKVVRELDKENKDVLKELDEAVKRVEKKLRDRG

SEQ ID NO: 17748 - protein, 60 aa, Artificial Sequence
  Synthetic
EDEVVKRIDELVTHNKRLVEESVERSKESVDRNRRLAEKSVEDVRRLVEELKKLVDDITR

SEQ ID NO: 17749 - protein, 59 aa, Artificial Sequence
  Synthetic
SLEEVLRRLEKVVRDSDKRLEEVLTRLAKVVRESNKRDEDVHKELRDVVRRVEELLERS

SEQ ID NO: 17750 - protein, 56 aa, Artificial Sequence
  Synthetic
EETVDKLVEDNERLVREIVKEVDELVKRNEDRARESVDESRKLVRRIEERVREETR

SEQ ID NO: 17751 - protein, 56 aa, Artificial Sequence
  Synthetic
SVEDVLREAKRVLDEVRERLREVNTETNKVIKDVKKESDDVNRETNELIERVAREV

SEQ ID NO: 17752 - protein, 55 aa, Artificial Sequence
  Synthetic
EEVERLVDEVRKLVKRLVEHVKKLAKEIKELLERNVRHVEEVAERIKRLIKETKD

SEQ ID NO: 17753 - protein, 60 aa, Artificial Sequence
  Synthetic
ELREDVERVVDEIRRLVEENVRRIDEVAKDIKRLADDNVRRVKELVRKIEEDIRRLKEEG

SEQ ID NO: 17754 - protein, 56 aa, Artificial Sequence
  Synthetic
ERVLKKLKEVIEDVERKSRDALRRLEEAIRRVRRESERVNRELDEVIKRVTEELKK

SEQ ID NO: 17755 - protein, 58 aa, Artificial Sequence
  Synthetic
SAREKVEKVVKEVEELVKRDVEEVERIVEEVKKLVTEDLKISEEIVERVDRLIRELKK

SEQ ID NO: 17756 - protein, 56 aa, Artificial Sequence
  Synthetic
ERVLKKLEDVVRRVEKESEDALRRLKEVIKKVKRESEEANRKLEEVIRRVVERVRR

SEQ ID NO: 17757 - protein, 59 aa, Artificial Sequence
  Synthetic
SRSEKLVDEARKMVERSKEIVDKSEREVEDVVRRARRNVEKVLKDAKKVVDEVDELTKR

SEQ ID NO: 17758 - protein, 55 aa, Artificial Sequence
  Synthetic
EDVLREVEELVRRVEEENDRVLKRAKELVEDVKRKHDRVLETVRKLVEDVTRRLK

SEQ ID NO: 17759 - protein, 57 aa, Artificial Sequence
  Synthetic
DEVDKVKEELERVIKEVDERNKRSSERLEEVNRKIRKEIKEVVERLKELIERVLRKV

SEQ ID NO: 17760 - protein, 56 aa, Artificial Sequence
  Synthetic
VDEIRRLVEEVLRRARKLVEEDKELIKKSLKDLKTIVDELRKLLEDVIREAERTAR

SEQ ID NO: 17761 - protein, 55 aa, Artificial Sequence
  Synthetic
EEVERILEDVRRMIEDHRRKVEEIVKRSEDMARRLIEEVKRIVEESKKLADELKK

SEQ ID NO: 17762 - protein, 55 aa, Artificial Sequence
  Synthetic
EDVRRELKRLVDEVKKRNDEVRERDKEVVDRVKEVLDRVRETDRRLVEEVRRRAN

SEQ ID NO: 17763 - protein, 55 aa, Artificial Sequence
  Synthetic
SRVEKILEDVKEEIKKHKEEVDRIVKRSREMAKRHIERVDEILERSRRMIEELKK

SEQ ID NO: 17764 - protein, 55 aa, Artificial Sequence
  Synthetic
EDVERELRRLVEEVEKRNEDVEREDRRLVEEVKKRNDEVRKEDRRLVEEVKERAR

SEQ ID NO: 17765 - protein, 61 aa, Artificial Sequence
  Synthetic
DELEKVEKDVRRLLEKVRKRIDEVRKEVERLSRESEEVTRRVLETVEKLLKDVERVIRETL

SEQ ID NO: 17766 - protein, 56 aa, Artificial Sequence
  Synthetic
VEEVLETVKRLIERIEEEIEKVVKDVERLVRESIKHSRDVLKEVDDLIKRIRERVK

SEQ ID NO: 17767 - protein, 56 aa, Artificial Sequence
  Synthetic
DDDKRIREILRRVHEKSEKVLRKVRKRLEEVRRESEEVVRRVKKDLDRVLEEVRRK

SEQ ID NO: 17768 - protein, 55 aa, Artificial Sequence
  Synthetic
EDVAREVEEIAKRTIDRVEAIVREVERIARESIDNVRRVVEEVKRAVTELIKRVE

SEQ ID NO: 17769 - protein, 56 aa, Artificial Sequence
  Synthetic
SEDETIRRIVRTVHEESRKSTEDVRREVERVLRESEEVVKKVKKKVDDVLKRVEET

SEQ ID NO: 17770 - protein, 55 aa, Artificial Sequence
  Synthetic
EEVAREVTKIARDTIRENEEIAKEVREIVERSIKNLEEVAEEVERVVRELIEARR

SEQ ID NO: 17771 - protein, 56 aa, Artificial Sequence
  Synthetic
SRDEKIRDILRRVLKEVRDSTKKVEEDLEDVHRRTEEELRKVKKRLDEVLKRVRDE

SEQ ID NO: 17772 - protein, 55 aa, Artificial Sequence
  Synthetic
EKVAEEVKRIADRLIDLNRRIAEEVDKIVRDSIKKVEEIVTEVEKIVEKLIRDVR

SEQ ID NO: 17773 - protein, 55 aa, Artificial Sequence
  Synthetic
DRLEKIVEEVRRLADELIRHVERNVREVEKAVRESIEHVRDVAEKVERAVRELEK

SEQ ID NO: 17774 - protein, 55 aa, Artificial Sequence
  Synthetic
EEVRKELKRVIREVEKVNKESNDVTRKVKEESEKVLKEVEKRLREVIRRVKEKIR

SEQ ID NO: 17775 - protein, 55 aa, Artificial Sequence
  Synthetic
SEVEDVVRKVEKLVRDLIKHVEENVRRVEEVVRKLIEEIKRIAEEITRIAEELAK

SEQ ID NO: 17776 - protein, 55 aa, Artificial Sequence
  Synthetic
EEVEKVLREVVKEVEKVNRESREVTRRVLEEAKEMLERVKKIVKEVIEKVRRVVK

SEQ ID NO: 17777 - protein, 60 aa, Artificial Sequence
  Synthetic
SADREVEERLREVIERVKEALKRSKDVTDEVTRRVEKLDKESNDTSREVIRRVEDMLSRV

SEQ ID NO: 17778 - protein, 59 aa, Artificial Sequence
  Synthetic
DELVKRIVEKVDKAVKDLEKLVRENVERVRRAVERSRKTVEDNVKRSRDVVRELRERVR

SEQ ID NO: 17779 - protein, 60 aa, Artificial Sequence
  Synthetic
SSIDEVREEIRRVIEEVRKLLEESKKDTDRVRREAEDMDRKANETVEEVERRVREVLRSV

SEQ ID NO: 17780 - protein, 59 aa, Artificial Sequence
  Synthetic
EEVVRRILKRIEEVLKKLRKAIKDNVDRVRDAVRRSRRTVEDIVRRVREVLERLEREIK

SEQ ID NO: 17781 - protein, 56 aa, Artificial Sequence
  Synthetic
SLAEEVERRLEESHKRARKLVKEVKEALEESHKESDRLVREVEKELKRVAEEVRKE

SEQ ID NO: 17782 - protein, 56 aa, Artificial Sequence
  Synthetic
VEKVRDLVRKTTEKVEEVVRRLRELVKENLDEAKRVVEDLKRKVKEIEEKVKEDSK

SEQ ID NO: 17783 - protein, 56 aa, Artificial Sequence
  Synthetic
SMAEKVDEVSKRSKEELKRVVKEVHEVSTRVEKVVKDVLREVEKVSKESTDVVDRV

SEQ ID NO: 17784 - protein, 59 aa, Artificial Sequence
  Synthetic
REVVDKVVRDLEKTVKDVKEVVDRAVTASKELVDRIRRLAEEVVRALERTVDKVRRDAK

SEQ ID NO: 17785 - protein, 56 aa, Artificial Sequence
  Synthetic
DAREEVDEVSRESKEELKRVLDEVDDVSEKSRKTVRDMLRKNKEVVDEVEKTLEDV

SEQ ID NO: 17786 - protein, 59 aa, Artificial Sequence
  Synthetic
KEVVKDVVRKLRETVKRVREVAEEVVRELEKTVDEVRKRADDSVKKHRDLVKEVKEAAD

SEQ ID NO: 17787 - protein, 56 aa, Artificial Sequence
  Synthetic
SAEEDVERVVREVEREVREALRRVREVSERSREDVRRVVDENRKVAEEVEKRVRDV

SEQ ID NO: 17788 - protein, 59 aa, Artificial Sequence
  Synthetic
EEVVREVVKKLREIVKDIRRLAEEVVRRLEDTVRKVREIAKRSVDAHRELVRRVEERAR

SEQ ID NO: 17789 - protein, 56 aa, Artificial Sequence
  Synthetic
SSAEEVERVLRRVEEEDRRLVAEVRRVLKESRRTLEELVRRVKEVLEEVRKEVERI

SEQ ID NO: 17790 - protein, 56 aa, Artificial Sequence
  Synthetic
AKELIKRVEEIVEESRKLIDEAIREVEENVDRSRKKIKELIDRVREILKRARDRAR

SEQ ID NO: 17791 - protein, 56 aa, Artificial Sequence
  Synthetic
DSEEEVKKVLDEVRRRDEKLVEEVRKVNEDSLDTLRKLAEEVKRKLDEVRERVERL

SEQ ID NO: 17792 - protein, 56 aa, Artificial Sequence
  Synthetic
AEELIREVERIVKKSEDMIREHIRKVEENVEESKKEIEELIRRVDDILREAKEAAD

SEQ ID NO: 17793 - protein, 56 aa, Artificial Sequence
  Synthetic
SGEEDLERVLDEVRRRDKKLVEEVRKRNEDSLRRLERLAEEVERVNEDVLKKVEEL

SEQ ID NO: 17794 - protein, 56 aa, Artificial Sequence
  Synthetic
ASEVRKLVEEIVTDSRRRITEHIRRVEENAKDSERVIREHKERVKEILEKVRRAAE

SEQ ID NO: 17795 - protein, 59 aa, Artificial Sequence
  Synthetic
SEVEKLVEDVKKAVKEVLEEAKENVRKVEDVVRRVLERAEDNVEEVKKVVATLVDLVRR

SEQ ID NO: 17796 - protein, 59 aa, Artificial Sequence
  Synthetic
EELMREVRRVIKEVRDRVRDVLDEVRRVNEEVNRRVRKVLEDVRRVNERTKEDLDRESK

SEQ ID NO: 17797 - protein, 59 aa, Artificial Sequence
  Synthetic
SEVDKLVREVDELVKKSKDNIDKLVKRVREMVEESKRKADRNVEEVERVVREIKDLARR

SEQ ID NO: 17798 - protein, 59 aa, Artificial Sequence
  Synthetic
DELVKKVRDRLEEVERRTRKALEDVKRVLEDVKRLTDTALREVERVNRKTEEEVDREIR

SEQ ID NO: 17799 - protein, 59 aa, Artificial Sequence
  Synthetic
DKVDRVVKEIEEAVKENLDRVREIVKEVRDLVRENLEEVRKSVEDVKRLVKEILELVRA

SEQ ID NO: 17800 - protein, 59 aa, Artificial Sequence
  Synthetic
EDAVRKVEEVLREVEKRSTEALKELRDVLREVRRESEEALDENRRVTEEVKKKVEDERK

SEQ ID NO: 17801 - protein, 59 aa, Artificial Sequence
  Synthetic
SEVEEIVREIRDLVRKNEERVKKIVEDVRRAVEEILELAERSVEKVKRLVDDLRRLAEN

SEQ ID NO: 17802 - protein, 59 aa, Artificial Sequence
  Synthetic
EEAVRKVDRVLEEVEKRSRDALKELEEVLKEVERLAREVLEKNERVTEAVEDLVTKAAK

SEQ ID NO: 17803 - protein, 59 aa, Artificial Sequence
  Synthetic
DEEERVREELERVNEEVKELKKEVETVNKRVHETLEKVIREVKKVNDDVHRTVEDLRRR

SEQ ID NO: 17804 - protein, 56 aa, Artificial Sequence
  Synthetic
VEEIVKKIKEVVDRTRKLAKELVKESRDLAEDVKRLIKRLVEDSRRLVEEIKERAR

SEQ ID NO: 17805 - protein, 60 aa, Artificial Sequence
  Synthetic
SEEERVEKRLREVNKDVKRLVKKVRDVNRKVHEDTKRLVEEVRRVNRDVHRRVKELREAG

SEQ ID NO: 17806 - protein, 56 aa, Artificial Sequence
  Synthetic
VDKIVEEIDKVVTETRELAERLVKESEDNVERSRDLARKLVEKSERLVKEIDDRAR

SEQ ID NO: 17807 - protein, 59 aa, Artificial Sequence
  Synthetic
SAAEKVREELERVNRRVEELLKKVKKVNEEVRDIVRKVVREVERVNKEVEEEVKRLVDQ

SEQ ID NO: 17808 - protein, 56 aa, Artificial Sequence
  Synthetic
VEEIVKKIKDVVKRTDELAERLVETSERLARTIKKVAEDLVRDSKRIVDEVRTRIT

SEQ ID NO: 17809 - protein, 59 aa, Artificial Sequence
  Synthetic
SDEDRVRRRLEEVNREVEELLRDVERVNEEVKRRVKKVIREVEEVNKRVEEEVKRLRDE

SEQ ID NO: 17810 - protein, 56 aa, Artificial Sequence
  Synthetic
VEDIVRKIDDVVRETRELAKELVKHVRDVVEDVRRLVKELVDLSEKLVKEIRDKVE

SEQ ID NO: 17811 - protein, 59 aa, Artificial Sequence
  Synthetic
SEVEKVVKEMEDLARENERLAREIVKDVERLVREIEDTVRRSVETTRRLVEEIRELAER

SEQ ID NO: 17812 - protein, 59 aa, Artificial Sequence
  Synthetic
ERVLELLERVLRELEKVVEDSKRRIKEVLDELRKAVDKVKKEDKKVHDELRKVVEEVRT

SEQ ID NO: 17813 - protein, 60 aa, Artificial Sequence
  Synthetic
RVEELLRKVITELDRVLEEVRRRNEASIEELDRVLKEVERLNKEVDEELKKVLEKVRKDV

SEQ ID NO: 17814 - protein, 59 aa, Artificial Sequence
  Synthetic
EEVVRRIVEEIKKVIDELREESRRTVREVEKLVKEILDRSRKTVEEVKRLAEEIERKAK

SEQ ID NO: 17815 - protein, 60 aa, Artificial Sequence
  Synthetic
RVKELVDEVKRKVEESMRESTERNRTATEKVEKSLRDSEKLNRDATRKLKKVVDDVRREG

SEQ ID NO: 17816 - protein, 55 aa, Artificial Sequence
  Synthetic
EEVVKKVEDVVERNKDLVRKSVEHIDKVVKENRELVKRSVEHIDRVVKEARERAR

SEQ ID NO: 17817 - protein, 60 aa, Artificial Sequence
  Synthetic
SAEELVKRVLDDVRRSAEESERLNREATEEVKRSLEKSRKDAERVLRDLERVVRKVKTEG

SEQ ID NO: 17818 - protein, 55 aa, Artificial Sequence
  Synthetic
ERVVRKVEAVVERNRKLVEDSVRHIREVVKRNEDLVRRLVEEVKRVVKKAEDKAR

SEQ ID NO: 17819 - protein, 60 aa, Artificial Sequence
  Synthetic
DVEELVKKVEDMVRKVIEEVKKRNTDVTRRVEESLRKSTELVREAEERLRRTLEELRRRG

SEQ ID NO: 17820 - protein, 55 aa, Artificial Sequence
  Synthetic
EEVVRKAEEVVKRAKELVARSVKHVDEVVRRNEELVTRLVRELDELVKEVRETAR

SEQ ID NO: 17821 - protein, 60 aa, Artificial Sequence
  Synthetic
RAERLVREVARRLEEVLKEVEKLNKDATDKVKKSLEDSRKKNEDVTREVRRVIEELRTRG

SEQ ID NO: 17822 - protein, 55 aa, Artificial Sequence
  Synthetic
EDVVRRAEELVERLRKIAEDSVRHLEEVVRKNERLVKESVDHVRTAVEELKETAR

SEQ ID NO: 17823 - protein, 59 aa, Artificial Sequence
  Synthetic
DAEEKVKEVEREVEKVIEEVKRDNTRVTEENKRVLDTVRERNKRVTDELRKVLEDVRRE

SEQ ID NO: 17824 - protein, 55 aa, Artificial Sequence
  Synthetic
EEVVKRIADVVKTVKRRVDESVKDIKRSVKETEDRVDRSVRHVEEVLKELRKASE

SEQ ID NO: 17825 - protein, 60 aa, Artificial Sequence
  Synthetic
SAEDKVRKVKKEVEKVIKDVKEENRRVTRENEEVLDRVKKDNERATRKLRKVVEDVRREG

SEQ ID NO: 17826 - protein, 55 aa, Artificial Sequence
  Synthetic
ERVVERIKRVVERVDELVRRSVKDVKDSVRETRKLVDDSVKDIDRVVKEARDRAK

SEQ ID NO: 17827 - protein, 59 aa, Artificial Sequence
  Synthetic
DAKDKVRKVLEEVKKVIEEVERRNRTVTRENERVLKEVKDRNTEVTKELKKVVEDVKRR

SEQ ID NO: 17828 - protein, 55 aa, Artificial Sequence
  Synthetic
EEVVDRVRRVVEEVTELVRRSVEEIKESVKTTRDLVRKSVKNIRDLVEEAKRRAD

SEQ ID NO: 17829 - protein, 59 aa, Artificial Sequence
  Synthetic
DEVETVVRDVKRLVRENERKVREIVKTVDKLVKENEDLVKRSVEELKKLAKEIKDLADE

SEQ ID NO: 17830 - protein, 55 aa, Artificial Sequence
  Synthetic
EDLRRVKKEAEDVVRDSERLIEEVKRRVKKVVDDSRRKDEEALRDVERVIEEVRR

SEQ ID NO: 17831 - protein, 60 aa, Artificial Sequence
  Synthetic
SEVDDVVRRVKKLVKEDRDLVRDSVRKLDELVRDDKRLVDEVVERLERIVKEIEDLMREG

SEQ ID NO: 17832 - protein, 55 aa, Artificial Sequence
  Synthetic
EKLEEVLKMLEKVSDEVKKENDRALKKVEDVSREVKELNKEVLKRARDVVERVRT

SEQ ID NO: 17833 - protein, 59 aa, Artificial Sequence
  Synthetic
SSKEKVKKVLDKVKEVLDRVRELVKRVDRESEKVVEDVRRKNKRASEKVKTVIRDVEEK

SEQ ID NO: 17834 - protein, 56 aa, Artificial Sequence
  Synthetic
VDDVLRKVEEIVRKVKDMVRKILEKAERNVEETERVVTESKENADRIVKEVEDRAR

SEQ ID NO: 17835 - protein, 60 aa, Artificial Sequence
  Synthetic
SAREAVTEVLRKVREVLKRVEDENRKVSKELRDLLEEVERRNRDLTEKVKRLIDELKERG

SEQ ID NO: 17836 - protein, 56 aa, Artificial Sequence
  Synthetic
VERILEEAERIVKELEEVLEESLRNVKEILKKLEDALRKSEEDVRRILERVEEEAR

SEQ ID NO: 17837 - protein, 59 aa, Artificial Sequence
  Synthetic
REVEEVLRRIKEMVKRIEELVRRSEDRAKKLVDTNRDLVRRSEERFRELVKEIEDVARE

SEQ ID NO: 17838 - protein, 55 aa, Artificial Sequence
  Synthetic
EELERVLREVEKVVRDVRRRNEKATRDVRRSVEESRRLDKRALDEVRKRIEEVRT

SEQ ID NO: 17839 - protein, 61 aa, Artificial Sequence
  Synthetic
RVEEVLKRVLDKLRESNKDSERLVREALKEHEEVNKEVEDRIREVLRRVEEVLKKVEKDKG

SEQ ID NO: 17840 - protein, 56 aa, Artificial Sequence
  Synthetic
AEDIKRLVDEIVDTDRKLVEEVKREAKESVKESEELVERVKRKADRIVEEVEKTVK

SEQ ID NO: 17841 - protein, 60 aa, Artificial Sequence
  Synthetic
DEVEEVRKTIERLVDRIEDVVRRVLELSRDTVRKNEDLVRRIEEELTKLVEDIKDVSRKR

SEQ ID NO: 17842 - protein, 55 aa, Artificial Sequence
  Synthetic
ELLEEVERLLEEVLRKAEKVIEDARKLDEDVNRKSNKVIEDVARRLEKVLKEVKD

SEQ ID NO: 17843 - protein, 60 aa, Artificial Sequence
  Synthetic
SVEDVIRRVKEKSEEVLKRLKEVIDEVKKRSEDVLKEVEDAIDEVRRRSEEALDRVRRAG

SEQ ID NO: 17844 - protein, 56 aa, Artificial Sequence
  Synthetic
SEEARDLADRDVEDVERVVTDIRRLVEKNVRDVRRVVREIEDAVRRNVKEIDRRVK

SEQ ID NO: 17845 - protein, 60 aa, Artificial Sequence
  Synthetic
SVEELIERVKRRSEKVLRDAEKTIRDLKKDSKRVNDELEKVIRDVMEKSKTALDEVRRRG

SEQ ID NO: 17846 - protein, 56 aa, Artificial Sequence
  Synthetic
SEEARRLVERDVEDVKRLVEEIKKLVTDNVRTVEDLVRRIKREAEENVKEIKEEVR

SEQ ID NO: 17847 - protein, 57 aa, Artificial Sequence
  Synthetic
SDVDRAVETNDKVVTEIVERVKEVVERNREIVERISTTVDEMVRRNRDIVRRVAERV

SEQ ID NO: 17848 - protein, 57 aa, Artificial Sequence
  Synthetic
VRDLVREVLERSDELVKRVEEEVKRLLERNKKLLDDVTEAAARLLKRNKEVVEELDK

SEQ ID NO: 17849 - protein, 57 aa, Artificial Sequence
  Synthetic
SEVDRVVEENDRVVRKVEEVVREAVERNETVAERVKDTVDRMVRENEKIVDKVRKDV

SEQ ID NO: 17850 - protein, 57 aa, Artificial Sequence
  Synthetic
VEKLVRDVLRESEKLVDDVRRAVKKLLEDSEELVREVKEAAEESLRRNKKIVEDLTR

SEQ ID NO: 17851 - protein, 57 aa, Artificial Sequence
  Synthetic
DELETVLREVERVVTEVKKLNERTVRDDKEVVERVLREIDKLLKEIREKVKEVKKKL

SEQ ID NO: 17852 - protein, 55 aa, Artificial Sequence
  Synthetic
EDVERTVRKLLEEIKDSVRKSKEDVRRSVEEIERLVRKVKEDVKRLLRDIRERAK

SEQ ID NO: 17853 - protein, 61 aa, Artificial Sequence
  Synthetic
SKVEKALKKIEDVLEDIKRLVEEVVERDERLLERLEEENKRADEKSKELVKRLTDLVRENK

SEQ ID NO: 17854 - protein, 59 aa, Artificial Sequence
  Synthetic
REALERIREILEEVRKAVEDLLRKIKETLKRIRERVKRLIENLEKSLEDARKEVDRLRK

SEQ ID NO: 17855 - protein, 61 aa, Artificial Sequence
  Synthetic
DVDERIEELLRRIERLVEESERDVRRLKREIDDLVTKSLKTVEESLKRIKELVDRVSEEAK

SEQ ID NO: 17856 - protein, 56 aa, Artificial Sequence
  Synthetic
KDDVERVVRRVLKEIDDSTKEIRRIVKRVLEEIERTTRDDKRVIDEVRELIKETSR

SEQ ID NO: 17857 - protein, 59 aa, Artificial Sequence
  Synthetic
DADELVTEVRKRVRETLEEIRTILDEVRKRVKKTVEDIRTEAERVKREVDKLVKEVRDN

SEQ ID NO: 17858 - protein, 56 aa, Artificial Sequence
  Synthetic
DREIEKLLDDNRRLIEEVLRRIDELVREDEELVKRVLDRIRTVLDRIREEVDEVRR

SEQ ID NO: 17859 - protein, 59 aa, Artificial Sequence
  Synthetic
DVRELLKKVEDEVRRTLKEIERILKEVKTESDKTLKEVAELLERLDRDVKRLVKEVRDN

SEQ ID NO: 17860 - protein, 56 aa, Artificial Sequence
  Synthetic
KEEIRKLVERNKELVRDVLRRIKELLKRDKEMLEEIRERIKEIEKRLKELLERAKR

SEQ ID NO: 17861 - protein, 61 aa, Artificial Sequence
  Synthetic
SEIEEVLKRVEEMIRRSKKLTDKVLREVEKMIRELDKKTDEVLERSERLARELKELVRRDV

SEQ ID NO: 17862 - protein, 59 aa, Artificial Sequence
  Synthetic
RERIEEILRRVTEAIKRSKEDSERIRETVTRLIRESEENSKRNLERVKKVIDELREEIR

SEQ ID NO: 17863 - protein, 61 aa, Artificial Sequence
  Synthetic
DKLEEVLKRVEEMLRELDKETDDVLKTVEDLLRRLDELTDEVLKESRRAAEELKRKVDRDI

SEQ ID NO: 17864 - protein, 59 aa, Artificial Sequence
  Synthetic
EEKIREIEKKARKLIKDSRKNIRDILETVKRLIEESDKNIKENEKRVRKVIDELDKEIK

SEQ ID NO: 17865 - protein, 61 aa, Artificial Sequence
  Synthetic
REKEEIIKKVKDVVKRVKEELKKIVEESERLVREVEEELKRSNEKSRDLVRRAEEELEKKS

SEQ ID NO: 17866 - protein, 56 aa, Artificial Sequence
  Synthetic
EEELDRLIKRVEDRARKVLEDSKRTIEEIEKVARDVLRRSEETVKEVEEKARRALK

SEQ ID NO: 17867 - protein, 61 aa, Artificial Sequence
  Synthetic
SAVEEIVKEVERIVREAEKALKKSVDDNRRIVEDAVRTLKRLVEEAARLVDEARKELTKKS

SEQ ID NO: 17868 - protein, 59 aa, Artificial Sequence
  Synthetic
EDVLRELKRLLKELERVVEEVLRRDRKWLEDTRREVKRVVEELKRLLDELREVVERARR

SEQ ID NO: 17869 - protein, 61 aa, Artificial Sequence
  Synthetic
KELEDLVREIEDTVDRIEREIRKLVEDDHRSVRKAEEDNRRLVKESEDLVRRIEEEIRKKE

SEQ ID NO: 17870 - protein, 56 aa, Artificial Sequence
  Synthetic
EEVMRRLKEDIERLMEEIRREVEKLNETTKEVVKESLETHKRIIERIREVAEETRR

SEQ ID NO: 17871 - protein, 57 aa, Artificial Sequence
  Synthetic
SSLEELLKEIRKRVERIKEELDRALKEDHDIVRKALRELDEMLKKNEETVRRAMERI

SEQ ID NO: 17872 - protein, 56 aa, Artificial Sequence
  Synthetic
EDVVRKVLEELEEEARRVLRELRESLKRTEELVRRALETLKRSDEETKKLVEDIER

SEQ ID NO: 17873 - protein, 57 aa, Artificial Sequence
  Synthetic
SSLEELIKEDHRVVREAEKRLEELLKEDHDRLREAKEELERVLKRDHETLKEVVERI

SEQ ID NO: 17874 - protein, 56 aa, Artificial Sequence
  Synthetic
EEVLKKIIERTRDLVRRALRTMEESIKRTEELVKKLLDELEASIRKTEEDADRIRK

SEQ ID NO: 17875 - protein, 58 aa, Artificial Sequence
  Synthetic
SSLERLIEEDHETVRRVKKTLDDMLKRDHEVVDEARRRLDELLKRDTDIVRDAVKRIR

SEQ ID NO: 17876 - protein, 56 aa, Artificial Sequence
  Synthetic
EEVLKKIIKETKELAKEAVERLEESIKETEDLVRRVLKEMEESLRRTEELVREIER

SEQ ID NO: 17877 - protein, 56 aa, Artificial Sequence
  Synthetic
SIEEVIERIREEAERLLKELEEVNRESTRLAEDLREELRRVLENSRALVKELKERI

SEQ ID NO: 17878 - protein, 59 aa, Artificial Sequence
  Synthetic
DKSLKELLRDVERKIREVRKRLKESLERVEREIRRVREEIKRLNDESRERIERVKRRVD

SEQ ID NO: 17879 - protein, 59 aa, Artificial Sequence
  Synthetic
DAEELLRRLDKSSKETLKRNEESLRRSEETSKRSLDTNRRSLEKIEKIATDLRRKLSER

SEQ ID NO: 17880 - protein, 55 aa, Artificial Sequence
  Synthetic
ERVVREAEKLDEDNTRHSRRNLEESKRLDEENIKRSEDLLRDVRRLIEEVLEEAR

SEQ ID NO: 17881 - protein, 60 aa, Artificial Sequence
  Synthetic
SKLDEILERAKKLIDDLRKESDDVLRRDRELIERIRRKSEEVLERVKRLIEELEDRVRKV

SEQ ID NO: 17882 - protein, 60 aa, Artificial Sequence
  Synthetic
EDEVRRVLRELERLVKELKDKNKESLDELKKTNDRLEEENRESLRRAREEARRILEEIRR

SEQ ID NO: 17883 - protein, 60 aa, Artificial Sequence
  Synthetic
DELEEILKRVEKLIRDSIEKIRRILEEDRELIKELIKESREVLERVRELIKTLEKKVKDV

SEQ ID NO: 17884 - protein, 60 aa, Artificial Sequence
  Synthetic
RRTVEEVLKRIEELVKRSLEESDRVAKEVRKTNEEVKKTNEDSLRKIKELVKRILEKIRK

SEQ ID NO: 17885 - protein, 60 aa, Artificial Sequence
  Synthetic
DELEDVLREVRKLIKELEKKSREVLKRDKELIDRIRKESEEVLKRVEDVLRKLEDEVRKV

SEQ ID NO: 17886 - protein, 60 aa, Artificial Sequence
  Synthetic
KRRVDEVLEEIERRVTELNKKNEESLRRAEKTNKELDEENKESLERIRKLIEDILRKIEK

SEQ ID NO: 17887 - protein, 59 aa, Artificial Sequence
  Synthetic
DELERILEEVKRRIERLIERLREVLERDKKLIEDIRRESEDVLRRVEEVIKKIREELER

SEQ ID NO: 17888 - protein, 60 aa, Artificial Sequence
  Synthetic
RETVKDVLRKLRKIADEVRRDIERVLDEARKTNKRLDEENKDSLKKLRDRAKELLDEVRR

SEQ ID NO: 17889 - protein, 61 aa, Artificial Sequence
  Synthetic
RELEEVLKEAEKLIREITEEVKEALRRDEKTVRDNIRDLRRVLEEVRKLIEEILDRVRRRG

SEQ ID NO: 17890 - protein, 56 aa, Artificial Sequence
  Synthetic
SKFLERLEELITRLKERIDKALRDLEKTNDELRKRSEEVLRRLERLLERLREEIRR

SEQ ID NO: 17891 - protein, 56 aa, Artificial Sequence
  Synthetic
SEVERVLEDSRRTNEEIIKRLRDALRESEKTNRDIEKRLREMLKKSKETNERIKRS

SEQ ID NO: 17892 - protein, 56 aa, Artificial Sequence
  Synthetic
KKVLDKARELVRRTEEIVKDVIRKSRELVKESKERVDRVITESRRVVKKTLDDIRK

SEQ ID NO: 17893 - protein, 56 aa, Artificial Sequence
  Synthetic
SEIEEALKRSKETNERIIRKLEEVLRRSRKTNEEIIRRVERVLEDSERTNREIEKS

SEQ ID NO: 17894 - protein, 56 aa, Artificial Sequence
  Synthetic
EEFLRTVKKLVDDTRKAVEEVITRSRRLVEESERRVREVIDRMRKLVEETKRKLDK

SEQ ID NO: 17895 - protein, 56 aa, Artificial Sequence
  Synthetic
SEIEKALKESEDTNRKIKDDLRKVAERVRKLIEDVIRTLERVLRDSERTNREITRS

SEQ ID NO: 17896 - protein, 56 aa, Artificial Sequence
  Synthetic
EDVLRKAKRLVDETLKEVERVIRELEKLVEDLEETVKEVIKRSRELVDETEKRIRD

SEQ ID NO: 17897 - protein, 56 aa, Artificial Sequence
  Synthetic
EEIERALKKSEETNRDIIRKLREVNERDKRAVERDEEELKKALDESRKTNEDIRKS

SEQ ID NO: 17898 - protein, 56 aa, Artificial Sequence
  Synthetic
KDVLETVRKLVEDTLREVERVITHSLKRVEDTLRKAKEIADRMRTLVRKTLEDIER

SEQ ID NO: 17899 - protein, 56 aa, Artificial Sequence
  Synthetic
DEVERVLEKSKRTNEDIIRRLEEVNKTDRKLVEDDIRRLEKALRDARKTNEEIRTS

SEQ ID NO: 17900 - protein, 56 aa, Artificial Sequence
  Synthetic
EDVLRKVRELVERTKERVERVIDHSRKVVETTLREVERVIREIEELSKDSERKIRK

SEQ ID NO: 17901 - protein, 56 aa, Artificial Sequence
  Synthetic
SDAERALKESEDTNREIIEKLERVNKRDKDIVDKIREDLKRVLERVRDTNRRIRES

SEQ ID NO: 17902 - protein, 56 aa, Artificial Sequence
  Synthetic
ERVLREVKRLIDETKRIVDEVIKHSKEEIDKLREEVERVIKELRELSDKSLDDIRK

SEQ ID NO: 17903 - protein, 56 aa, Artificial Sequence
  Synthetic
KEIEDVLKKSEDTNRRIIERLRKANDTDRRLIEDTIRKLREVLKEAEKTNKDIKDS

SEQ ID NO: 17904 - protein, 56 aa, Artificial Sequence
  Synthetic
EDVLRTVEELIERTEREVERVIAHSEDLIRRSNEDVKRVIKTIRELSEDSKRAADK

SEQ ID NO: 17905 - protein, 56 aa, Artificial Sequence
  Synthetic
DEERVLKELEDLLREILKDIERTVRESRKLVKTILDEIEEVARHNRKLIEEIRREV

SEQ ID NO: 17906 - protein, 56 aa, Artificial Sequence
  Synthetic
LKELLETVRRVIEEVKKVLKRSLEESKKVIDDVRRHLEKNNRDIKTVIDRVREKAK

SEQ ID NO: 17907 - protein, 55 aa, Artificial Sequence
  Synthetic
SVEEVVEEVKRLIEEVEKTNKKTVEDSKRLIDDIRRRIEEVMRHNRELIKKIERE

SEQ ID NO: 17908 - protein, 56 aa, Artificial Sequence
  Synthetic
LRELLERVRRLVEESKRNAEESLRRSEKVIKEATDHLRRNNETIKRVIDRVREEAK

SEQ ID NO: 17909 - protein, 55 aa, Artificial Sequence
  Synthetic
DTERVLKTLRDLIDTILKRNEEILRHNEKLSRDSKRRIEEVARHNRDLARRVEEE

SEQ ID NO: 17910 - protein, 56 aa, Artificial Sequence
  Synthetic
LRKLLEDVKEIIKTSKENVDRNNDRIRRVVERSEKHLEDNNRDVKRVVDEVREEAR

SEQ ID NO: 17911 - protein, 59 aa, Artificial Sequence
  Synthetic
KEEEDIKREIEKRITEIKKKNEEVLRRVEELIKRIHELNKRIEDTIDEEIRRIEDLVRR

SEQ ID NO: 17912 - protein, 56 aa, Artificial Sequence
  Synthetic
DDVLRKLKRLLDEIIKHSEDVLRKIKELLDEIKRDSDRVFKKLKELLDRIAREIEK

SEQ ID NO: 17913 - protein, 60 aa, Artificial Sequence
  Synthetic
RELEEIDRKIKKLIEDIHRENRDILRRIRELIERIKKKNEDILREVRKLIKEIEDLVREG

SEQ ID NO: 17914 - protein, 56 aa, Artificial Sequence
  Synthetic
DKVLKKLEDLLREIKKDSDRVLEEARKLLEEIKRHSDEVLEEIKKLLDDIKKRVET

SEQ ID NO: 17915 - protein, 59 aa, Artificial Sequence
  Synthetic
SELEKIDDEIRKLIEDIHRLNREIARRNEKTIREIRKKNEDVLRRNKRSADEIDRLVKE

SEQ ID NO: 17916 - protein, 56 aa, Artificial Sequence
  Synthetic
SEALRKLKRLLEEIERDSRRVLDELHKTDEDIERHSREVEDRAHKTDKTIKDRVET

SEQ ID NO: 17917 - protein, 60 aa, Artificial Sequence
  Synthetic
SEDEKILEEVRREIERIHEENRKVRERIERLIREIHKLNREVLERNKESIEEIRRLVEEG

SEQ ID NO: 17918 - protein, 56 aa, Artificial Sequence
  Synthetic
SKFLEDIERLLREIDKDSKRVLEELKRLLDEIRKDSDRVLKTAHDTDDKILKDIDK

SEQ ID NO: 17919 - protein, 59 aa, Artificial Sequence
  Synthetic
KEEDEVREEIKRRIEEIARLNKEIEDEIRELIKRIHELNREILKKVRKLIEEIEDLVRK

SEQ ID NO: 17920 - protein, 56 aa, Artificial Sequence
  Synthetic
SEVLRELDELLRRIKKNSEDVARKLKDLLRRIREDSERVAKEIRRLVEEIKKKVDK

SEQ ID NO: 17921 - protein, 61 aa, Artificial Sequence
  Synthetic
DEVKRIVDEVRRLVEKVHRVNEEVVKESEDLVREVHRKNKRVLDESERLVEEVERVLKRDV

SEQ ID NO: 17922 - protein, 55 aa, Artificial Sequence
  Synthetic
ERVLRTAEEVIRRLEKHSKDLLDTSRRLAEEILRKSDDLLRRSKEKIDDLKRKIK

SEQ ID NO: 17923 - protein, 61 aa, Artificial Sequence
  Synthetic
SEVDRIKEEVRKLLEEHHKRNEDIVREVTRLLEEHHKKNEEVVRESEKLVKKIREILRDRV

SEQ ID NO: 17924 - protein, 55 aa, Artificial Sequence
  Synthetic
ERVLEEARKVVRELNRRSEELLKRARELVERLDRKSEELLRKSERIIKKIEEDIR

SEQ ID NO: 17925 - protein, 61 aa, Artificial Sequence
  Synthetic
KEVEEIVRDVRRLVEEHHRENRKIVETVEDLVRKVHRENKRVVEESERLVDELTKILRDTL

SEQ ID NO: 17926 - protein, 55 aa, Artificial Sequence
  Synthetic
EEVLKRVREAIRRLNEDSKRLLKEARDVVERIKRNSDKALEESKRKLKEIEERIK

SEQ ID NO: 17927 - protein, 61 aa, Artificial Sequence
  Synthetic
SKMEEVRRRIKEEADRDEEDNRRVLEDIRRLIEENKRRNEEVLKRIEKKARDLLERIKKDG

SEQ ID NO: 17928 - protein, 55 aa, Artificial Sequence
  Synthetic
EEIIKEVSTLNEKLKRDTDEILKEVTRLNERLKEETDRILEEVKKLIDKVRKAVE

SEQ ID NO: 17929 - protein, 61 aa, Artificial Sequence
  Synthetic
KEADDVKRRLDDLIRRNEEKIRDVRRRVKELVDRNRKKIKEVLDKVKEIIDRLKDEIDKTG

SEQ ID NO: 17930 - protein, 55 aa, Artificial Sequence
  Synthetic
ERIIEEVTRENDRLRKESDRVLDEVSKLNDEARKETDDVLKTVDELVREVAEKAK

SEQ ID NO: 17931 - protein, 61 aa, Artificial Sequence
  Synthetic
SDAERLLETVRRIAKRLKELNEEVLREAKRIIDRVREENERSRETIREIMKKLKEDIDRIG

SEQ ID NO: 17932 - protein, 56 aa, Artificial Sequence
  Synthetic
VDEILRDVERLLEEVRRSVKESTRRIKRLLDEVRKSVKESTKEIKKLLKDVEDAAR

SEQ ID NO: 17933 - protein, 61 aa, Artificial Sequence
  Synthetic
KDIEDLRRRIEEIIEEAKRLDKTSLELIRRIIKRIKDENKKMLDEAEKIIRDALKTIDDVG

SEQ ID NO: 17934 - protein, 56 aa, Artificial Sequence
  Synthetic
VEDVTRRIEELLEEVRKSSEDSIRDIRRLLKEVRDSFKRSSDELKRLLDEVRKRAE

SEQ ID NO: 17935 - protein, 63 aa, Artificial Sequence
  Synthetic
RELEEVVKELRRLLEEVRKRVEDSIKRLDELLDEVRRSNKKSSEDTRKLLKELEDEARKVMER

SEQ ID NO: 17936 - protein, 56 aa, Artificial Sequence
  Synthetic
VREVREEIERIVTKARKVVKEDDDLVKRIVAEARRLSKESEEKVREIVKRAEEKVR

SEQ ID NO: 17937 - protein, 55 aa, Artificial Sequence
  Synthetic
DEVEELREELERLLKESEDRLREVKKRSDDSLKESRELIKKVRDTLERLLREVED

SEQ ID NO: 17938 - protein, 56 aa, Artificial Sequence
  Synthetic
VETVAREVRERVERSKRHIEKVLKEDEEMVRESKKNIEDLLRRVKEDIDRLKEEVD

SEQ ID NO: 17939 - protein, 55 aa, Artificial Sequence
  Synthetic
SKADRLREELDRLLKEVKELNERSKRESDRSLEEIKRLIEKVERESEKTLREVRA

SEQ ID NO: 17940 - protein, 56 aa, Artificial Sequence
  Synthetic
IDTVVEEVKKLIKEILDHIRELVEDDKRKIKEILEEIKKLAEDDRRKVEEVKRKVD

SEQ ID NO: 17941 - protein, 57 aa, Artificial Sequence
  Synthetic
SDVEDLKKKLDELLEEVERTSREVRKTSERSLEEVEKLLRRVKEESKRLLEEVERDI

SEQ ID NO: 17942 - protein, 56 aa, Artificial Sequence
  Synthetic
VKKVLDDVKKLVDDVKRKDKKLLDDDRRRVEEALEHIKRNLDRSRDLIRRIKEKAK

SEQ ID NO: 17943 - protein, 57 aa, Artificial Sequence
  Synthetic
DEVKKLKDDLDRLLDEIRRKIEKVRKDSEDSLKRVEELIRRVEEESRRLLEDVKREI

SEQ ID NO: 17944 - protein, 56 aa, Artificial Sequence
  Synthetic
IKKVLDDVRREIRRIDEEIKRVEEEDRRMVTELLKHIERNLERSKRLADEVKEKAR

SEQ ID NO: 17945 - protein, 55 aa, Artificial Sequence
  Synthetic
KEVDELRKALKELLDEVRETSKRVLDETRRLLEEVRRELERVKRESDETLKRIKD

SEQ ID NO: 17946 - protein, 56 aa, Artificial Sequence
  Synthetic
VDTVLEDVKRKIDELKEHDKRNLDESRRLITELLERIKKLAEDDRRVIEEIERRIQ

SEQ ID NO: 17947 - protein, 60 aa, Artificial Sequence
  Synthetic
KTMDEIKKEVTDLVRRIRELNERVERTVEDLVRKSRRLNERVLREVERLVKEVRDALRDK

SEQ ID NO: 17948 - protein, 59 aa, Artificial Sequence
  Synthetic
DETLEKVVDDVRKRIKRSKEHSDEVLEDAKKKIDENLEHSRRVLEEAKKLIDDLKDEIR

SEQ ID NO: 17949 - protein, 60 aa, Artificial Sequence
  Synthetic
EKAERIIEEVTDLVRRVRETTKTVKEEVRKLVERSKRRNEEIRREVKELVDEVEKKLREK

SEQ ID NO: 17950 - protein, 59 aa, Artificial Sequence
  Synthetic
KDALEKVRRDVERLIRELEKTDRDVLEEVKKLIEESERNSDRILEEVRRIIEELKKKIK

SEQ ID NO: 17951 - protein, 60 aa, Artificial Sequence
  Synthetic
SVVDEIRERVERLLREVEKTTEELRDTVRKLVEESEELTKRIEDEVRKLVEKVRRELRRK

SEQ ID NO: 17952 - protein, 59 aa, Artificial Sequence
  Synthetic
EDKLREVLEEVKERIDRLKELDKKILEDVKRLVKESKEELKDILRRARKLIRDLEEKIK

SEQ ID NO: 17953 - protein, 60 aa, Artificial Sequence
  Synthetic
SEVEKMLKELKELVERALERDKDALRKLRDLVRESLERDKRMVDKLDELVKEIEDRIRKR

SEQ ID NO: 17954 - protein, 59 aa, Artificial Sequence
  Synthetic
REKVDKIRRDVKRLLDESRESLERSEKDVEKLLEDSRDSLRKSKKRVEELVKRVEEALK

SEQ ID NO: 17955 - protein, 60 aa, Artificial Sequence
  Synthetic
REVEEALKESTDTIKKILDDDRKAMDELKKLVDKSLEDDKRAVDRLRELVKEIKKIIKKR

SEQ ID NO: 17956 - protein, 59 aa, Artificial Sequence
  Synthetic
KEDVDRIEEESRRLNEESRDSLRKSEDTVRKLLEESKESLDRSRREVEKLLKEVEDALR

SEQ ID NO: 17957 - protein, 61 aa, Artificial Sequence
  Synthetic
SELEELDREVEELVERSKRTNERVVEESKRLVDESRRDIDRLLEEVRKLVKDILERIKEEG

SEQ ID NO: 17958 - protein, 59 aa, Artificial Sequence
  Synthetic
SEDVRRLLEKIERLIEESNRSLERSREESERLSKESEDRLRELEKTVKELLKRVEEALR

SEQ ID NO: 17959 - protein, 61 aa, Artificial Sequence
  Synthetic
DEIRELLKKAEELVERSLRDNEKVVDELKKLVDESLRRIREMLKRAEDEVRKILEDIERKG

SEQ ID NO: 17960 - protein, 59 aa, Artificial Sequence
  Synthetic
SDEVDTLRRTVDKLVKDSNRSLEESKRTLEDLIRRSKEELDKLEKDVRRLLDEVRKALK

SEQ ID NO: 17961 - protein, 60 aa, Artificial Sequence
  Synthetic
DELEDAMRRVEEMAERSERNIRRSIRKVEELVTRSKKNIEDSLREVEKVAREAEELLRRN

SEQ ID NO: 17962 - protein, 55 aa, Artificial Sequence
  Synthetic
EEVKRRLDELLKRVTDLDRDSEKKLRELLEEVTKLDKESKDRLDELLEKVRRDRE

SEQ ID NO: 17963 - protein, 61 aa, Artificial Sequence
  Synthetic
SEVDKLLDRLTKLAKRSIDEARRLVERDREVLEKSIRDAEKLVERDEKVLEDIKRLIEREG

SEQ ID NO: 17964 - protein, 55 aa, Artificial Sequence
  Synthetic
ETVRRLVTELNKASKKVVDDVRRESEKSNRDSEDVVRKVKKASDKSLEDVERDIR

SEQ ID NO: 17965 - protein, 61 aa, Artificial Sequence
  Synthetic
EEVERIVERLKRLAEEDSREIKEVMDRNRESVRRILKRIKDIVEELRRLVEEIKKKIEKDG

SEQ ID NO: 17966 - protein, 59 aa, Artificial Sequence
  Synthetic
KEKVERLEKDIRRLEKESEDALRRLEDTSKRTDDEIERAIEELERTITDLVREIRERVR

SEQ ID NO: 17967 - protein, 60 aa, Artificial Sequence
  Synthetic
REVDEIRKELDDRVREIKKRIEEAVEDSRRTVEEIKRRVEEVDKTDRKLVEDIKREIDRR

SEQ ID NO: 17968 - protein, 59 aa, Artificial Sequence
  Synthetic
RKKAEELRDRVRKLVEEIERLLEELRRTLEKTRREIERVVEENRRSVEELIREIKERVD

SEQ ID NO: 17969 - protein, 60 aa, Artificial Sequence
  Synthetic
DDERRVKEEIKRILTEAKKVIDENKRRSEEVLDRVRKLVKENKDENDEVLKTVDELVRRG

SEQ ID NO: 17970 - protein, 55 aa, Artificial Sequence
  Synthetic
EEVRKELKRVLDEVRRLVKETEETDRTSNRTVAELAKDLEKKTDDIEREVRKKVT

SEQ ID NO: 17971 - protein, 61 aa, Artificial Sequence
  Synthetic
DRVERILKKIEDALRKVEELIRRNKKKIDDVLDEVRRLVEESKKRIDEILDEVRDRITKLK

SEQ ID NO: 17972 - protein, 58 aa, Artificial Sequence
  Synthetic
KEAKRLKDLLDTVRETVKRLNDELRKRSEEVLRRVDKLNKESKKRLDEVLRTVREELR

SEQ ID NO: 17973 - protein, 60 aa, Artificial Sequence
  Synthetic
REIEEVKKENDKSLKEIEKIIREVKEENKRSLDKIKRIIERALEEIKRMLEKAKKLADEG

SEQ ID NO: 17974 - protein, 59 aa, Artificial Sequence
  Synthetic
DKFLTEVKRSFEKSVEDIKRLLKEVSESVKRSTDEIRRLLDEVRRAVEEVLRRIRELLR

SEQ ID NO: 17975 - protein, 57 aa, Artificial Sequence
  Synthetic
SLVEELRRVVEEVRKTLEELVKRLEDSVRRSAEEIRKLIEDAERSVRESERAVKETG

SEQ ID NO: 17976 - protein, 58 aa, Artificial Sequence
  Synthetic
KEIKELLEEIKEMLRRLKKKAEDIDRTNRELEKEVRELVERLLRDNRRLLKEVVERAK

SEQ ID NO: 17977 - protein, 57 aa, Artificial Sequence
  Synthetic
DKIEEAKKNVDESKRRVEELIRELRESVERSKRDVERLVRELEESVERSLETVKRDG

SEQ ID NO: 17978 - protein, 58 aa, Artificial Sequence
  Synthetic
KEVKELLKRNSDLLRRVEELVKKLDKENRDLLRKVREDAKKLLKENEDLLEKVKRDAR

SEQ ID NO: 17979 - protein, 57 aa, Artificial Sequence
  Synthetic
DEIEKAEKNVRDSRREVERVVKKLKESVDKSREEVERLVRELERSVEESRRLVEERG

SEQ ID NO: 17980 - protein, 58 aa, Artificial Sequence
  Synthetic
KEVDRLLERNSRLLEEVEERAKELDERNKKLLEEVRRRAEEVDKRNKDLLRTVDRRAR

SEQ ID NO: 17981 - protein, 57 aa, Artificial Sequence
  Synthetic
SLIEEARENVKDSKKKVKELVDRLRKSVEESRERVREVVRRLRESVDTSADAVRKAG

SEQ ID NO: 17982 - protein, 58 aa, Artificial Sequence
  Synthetic
EAVKRLLEENSKLLADVADEARKLNEENERLLREVEKKAKKLDDENRKLLEEVIETVR

SEQ ID NO: 17983 - protein, 57 aa, Artificial Sequence
  Synthetic
DEIEELKKNVEDSRREIDRLIKELKESVEKSRKDVEKVVKELRESVKDSLDKLEKTG

SEQ ID NO: 17984 - protein, 58 aa, Artificial Sequence
  Synthetic
KEIKELLKENSDLLERVREEAETLDRKNKELLERVKRKADRLNEENRRLLKEVIEKAR

SEQ ID NO: 17985 - protein, 60 aa, Artificial Sequence
  Synthetic
SEVEKLLRDLERLLEEIVKEAEDLDRENKERLKEIARKARELNEENKDLLRRVKELVDRN

SEQ ID NO: 17986 - protein, 59 aa, Artificial Sequence
  Synthetic
ERLVREVERVIREVRKRVEEVVRKVEESIKESEERVKELVKRVTDSLERSKKEVEDAIR

SEQ ID NO: 17987 - protein, 58 aa, Artificial Sequence
  Synthetic
SEVEELLKRLEDILRENERRARELNRKNKEVLKDNRRRAEEVNRRNKRMLDEAERLAE

SEQ ID NO: 17988 - protein, 59 aa, Artificial Sequence
  Synthetic
EKLVREVETKIEEVRRRSEELVKEVEKSLKESEDDSRRLVREIEESIRESEERIKRRVE

SEQ ID NO: 17989 - protein, 56 aa, Artificial Sequence
  Synthetic
DEVEEILEKSRRTLEENKRRAKEAVRRSRETLRESEERVKRVVEELRDRLRRIEEE

SEQ ID NO: 17990 - protein, 59 aa, Artificial Sequence
  Synthetic
EDALRKIKKVLDETETESRRTLEELRKVLEETHRRNEKLIRDLREVLKEIEEAVRRREK

SEQ ID NO: 17991 - protein, 56 aa, Artificial Sequence
  Synthetic
DEVEEALRRLEDLLRRNVEEAKEVVKDSERTLREDAERVKRVVEKSKRTLEAIEKR

SEQ ID NO: 17992 - protein, 59 aa, Artificial Sequence
  Synthetic
EEAVRRIEEVLKKIREDSKRTIDELRRVLERTEEETRRLIKELEDVLRRTEEEVKRRLK

SEQ ID NO: 17993 - protein, 61 aa, Artificial Sequence
  Synthetic
SEVEKVLEEIKRLLDRIKERVDETDRRNKELLKKIKDEVRRAVEEIRRLLEEIKKSADEKG

SEQ ID NO: 17994 - protein, 59 aa, Artificial Sequence
  Synthetic
EKLVREVEEVVTRVRKTIEDLVKKDNDSVRKSEERIKEVVKRIEEEVKRVLEDVDRLAK

SEQ ID NO: 17995 - protein, 57 aa, Artificial Sequence
  Synthetic
DEVRELLERNRRLLEEIKKTVKDLIRRNEELLKRIEDDAKRLIDRNEELLDELEKRL

SEQ ID NO: 17996 - protein, 59 aa, Artificial Sequence
  Synthetic
GEELEELRRVVEESDETIKRLLEEAKESVDRSLDRIRKLLEDVRRSVERSKKRIDEKRK

SEQ ID NO: 17997 - protein, 57 aa, Artificial Sequence
  Synthetic
DEVRKILKDIEDILREIEERVKRVIERNKRILEKIREDVKRVDDRNKKLLEELERKL

SEQ ID NO: 17998 - protein, 58 aa, Artificial Sequence
  Synthetic
DDLRRVEEVAKRIKDRIRELLDEIRRSVERSKRDVKRLLDELRRSVEESKRRIDEREK

SEQ ID NO: 17999 - protein, 57 aa, Artificial Sequence
  Synthetic
SEVDKLLRENEKLLEDIERTVKRMLERIKKLNDDVHREIRRIDEENRRLLDEIEKKV

SEQ ID NO: 18000 - protein, 59 aa, Artificial Sequence
  Synthetic
GRDLDRLRRVVEKSKKRIEELEREARKVAKDVKKNLEELLEEVKESVRESEKRIKETEK

SEQ ID NO: 18001 - protein, 60 aa, Artificial Sequence
  Synthetic
SLKERIEEELKKVKDTSDRLNEEVRRSVEDTRKRSEDLNEEVRRSVEESRRRVESLLKRI

SEQ ID NO: 18002 - protein, 59 aa, Artificial Sequence
  Synthetic
EEEVKKIIERIEEILERSERRNREIIKRDEEALKRSEERNREIIERDKEMLERLEREVR

SEQ ID NO: 18003 - protein, 60 aa, Artificial Sequence
  Synthetic
SLIETIKEVVKRVAETSKRLNDRVREELRKVEREVEELNREVERVLREVETAVDDLVKKI

SEQ ID NO: 18004 - protein, 59 aa, Artificial Sequence
  Synthetic
REEAEDIIRKIEEVLKKSKELNDRIIERIKKMLEDLRRHNEEIIEKIRRALKRLEDEAR

SEQ ID NO: 18005 - protein, 60 aa, Artificial Sequence
  Synthetic
SLKETIRELLKRVEEESRKLNEDVARSVRETKRRSDRLNEEVERSVRRSEEEVRRLLKRI

SEQ ID NO: 18006 - protein, 59 aa, Artificial Sequence
  Synthetic
KEKAEEIIRRIKEMLRRDEEENRRIIERDERALDKSRRLNEKIIEEDKKAMRDLEEEVK

SEQ ID NO: 18007 - protein, 60 aa, Artificial Sequence
  Synthetic
SEVEEIIKENRRTLERDRREVEKVIEENKRSLEEIERKVREIIKDNDRSAKEITELAKAG

SEQ ID NO: 18008 - protein, 59 aa, Artificial Sequence
  Synthetic
EELVDRLRKSLRDVREESKKLIDELRRSLEESDRRVKELIDRLRKSLDDSRKLVDDLRR

SEQ ID NO: 18009 - protein, 60 aa, Artificial Sequence
  Synthetic
SEVEEIIKDNERTLEEIRKRVEDVIREIRRLLERIERRVREAIKRNEESLRRIKELVERG

SEQ ID NO: 18010 - protein, 59 aa, Artificial Sequence
  Synthetic
DELVRTLRESLRRVAEEVKRLLKEVEDVAREVEDRVKKLIEDLRRSLEKSREDVERDSK

SEQ ID NO: 18011 - protein, 61 aa, Artificial Sequence
  Synthetic
DRVREIIKRLRDLLREIRTVVRKIIEDNRKSLEEIEEHNRRVIRELRELLKEIKETVEREG

SEQ ID NO: 18012 - protein, 59 aa, Artificial Sequence
  Synthetic
EEMIRTVKKVITEIAEEVKRLADEVRDSVRRSEEAVRRLTKETKEVVDDIVRRVRELIE

SEQ ID NO: 18013 - protein, 61 aa, Artificial Sequence
  Synthetic
KKVEEIIEELKKLLREIEEHNKRVIEENERSLEEIKRHNEEVIEELRELLERIEEVVKRKG

SEQ ID NO: 18014 - protein, 59 aa, Artificial Sequence
  Synthetic
EDMIRTVEDVVRRIERRVRELSRESEESIRRSTETVKKLTKDTRDVVRRILKTVRDRIK

SEQ ID NO: 18015 - protein, 64 aa, Artificial Sequence
  Synthetic
SLEERLREVLKDIERRVRELNETNKRVLDKSKTTVDELLKRLREVLEEIREEVRKLIEELARRG

SEQ ID NO: 18016 - protein, 59 aa, Artificial Sequence
  Synthetic
REMIEKVLRDLEELAKRIEDKNRETIKESEKTLEEIRRRVDRLLEELRRLLKEIAKEVK

SEQ ID NO: 18017 - protein, 64 aa, Artificial Sequence
  Synthetic
SLEETLEKVLRDITERSERLIRENEKNLRDVKREVEKLNERNRDVLKKIREKVRELIEELRRKG

SEQ ID NO: 18018 - protein, 59 aa, Artificial Sequence
  Synthetic
EEAIRKVLEELKKLLEEDERRAKRVSEESKELLDRLAEDNERTIRKLERLLEELERRTK

SEQ ID NO: 18019 - protein, 60 aa, Artificial Sequence
  Synthetic
SEVDKVLEELKKLLDDDRREVERLLRELRRLLDRDRREVEKSIRTLEKLLKEIEDIVRER

SEQ ID NO: 18020 - protein, 59 aa, Artificial Sequence
  Synthetic
KRALERVREVLERAEDESRKLSERIKKVLEDIERESKRLSEEDREVLKRIKEEVERLEK

SEQ ID NO: 18021 - protein, 60 aa, Artificial Sequence
  Synthetic
SEVDKVLEELKELLKRLEEDVKRSSKESEDLLRKDEEDVRRSIRELERLLEEIEERVRRR

SEQ ID NO: 18022 - protein, 59 aa, Artificial Sequence
  Synthetic
ERALREVRKVLEDIKKSVDELLKEDKDNLRETARESERLSREDKKVLERIEERVKELED

SEQ ID NO: 18023 - protein, 60 aa, Artificial Sequence
  Synthetic
SEVEKVIEELKKLADDDRRRVEKSLRELRKLLEELEKRVRDSLEKLKKLLKEIEDRVRRR

SEQ ID NO: 18024 - protein, 59 aa, Artificial Sequence
  Synthetic
EKLLREVRKVLREARETSRELSRADEKVLRDIRREVKRALDADKKVLDDIRERVKELEK

SEQ ID NO: 18025 - protein, 60 aa, Artificial Sequence
  Synthetic
DEVEKILKEIDDAVKDLKRKSDKSLTDDRRMVEELKKKSEESLREVEEMVRRLEDEASRT

SEQ ID NO: 18026 - protein, 59 aa, Artificial Sequence
  Synthetic
EKVVRRVRDILDKLRKTVERLVEENEDSARRTEETIRKLVKDNEDILRELRRLIEERRT

SEQ ID NO: 18027 - protein, 60 aa, Artificial Sequence
  Synthetic
SEVEEMLERLKELLRRIEKVVRDSLRRLKELMRRDEEEVRRSLRRLEELLKEIERVARER

SEQ ID NO: 18028 - protein, 59 aa, Artificial Sequence
  Synthetic
KKVLDEVKELLERIEETVRRLIEENERVLEEAEELSRKLSEDNEKVLEDARREAERLTK

SEQ ID NO: 18029 - protein, 60 aa, Artificial Sequence
  Synthetic
DEVEEVLKELEKLAREDEDRVRKSEKKLRELADKDREDVERSLRRLERLLEELKRVVEER

SEQ ID NO: 18030 - protein, 59 aa, Artificial Sequence
  Synthetic
KDMLERVERLLREAEKLSEKLSRDNEDLLRRARDLSRELSKENERLLEDIRRRVEEAIK

SEQ ID NO: 18031 - protein, 60 aa, Artificial Sequence
  Synthetic
REVEEVLERLKRLLDTLEREVRKSLEELKRLLDELRKESKKSLDELRKLAEELERVVRRL

SEQ ID NO: 18032 - protein, 59 aa, Artificial Sequence
  Synthetic
EKMLREVKRVLEEAERRVRELIEENKRLLKEIKEEVKKLIEENEKVLEEARRLAEELKK

SEQ ID NO: 18033 - protein, 60 aa, Artificial Sequence
  Synthetic
DEVREVLKKLEKLADELREEVRKSLEDLKRLLREDEERSKESLKDLERLAREIEEVVKKK

SEQ ID NO: 18034 - protein, 59 aa, Artificial Sequence
  Synthetic
EKALRDVEELLRRIEERVRRLIKENEDLLREIEKTSEKLSRDNKELLKEIEERVRRLRQ

SEQ ID NO: 18035 - protein, 60 aa, Artificial Sequence
  Synthetic
DEVEEALKTLEELMRRDKEEVDKSLEKLRRLLKEDEDRSRESLERLKRLAEELEEVVKKE

SEQ ID NO: 18036 - protein, 59 aa, Artificial Sequence
  Synthetic
RRVLERVKKLLEDARRLSERLSEENERVLEEAKRRSEELSKRNEDLLREIEKKMKEDTR

SEQ ID NO: 18037 - protein, 60 aa, Artificial Sequence
  Synthetic
SEVEKVLEELKKLADDLRRTSKRSEEELEKLARELEKRVRESEKRLRDLLRELEDVVRKK

SEQ ID NO: 18038 - protein, 59 aa, Artificial Sequence
  Synthetic
KDALKRVKELLDRIREEVEKLIRRNEKLLRDIEEKVRTLLERNERVLEEIKKKVDDDIK

SEQ ID NO: 18039 - protein, 60 aa, Artificial Sequence
  Synthetic
DEVREVLEELRRLMKELRDVSEKSLRDLRKLAEEDKDRVRKSLEKLRELLRTLEDVVRKR

SEQ ID NO: 18040 - protein, 59 aa, Artificial Sequence
  Synthetic
EKMLREVEDLLRRAEKEVRRLIEENKKLLKEAEETSRKLSKENEDVLRDIRRAVEELKR

SEQ ID NO: 18041 - protein, 60 aa, Artificial Sequence
  Synthetic
SEVEKALEDLERLAKELEKVSRESLRRLEKLLEDDRRRSKRSLEELEELLDRLRDTVRRR

SEQ ID NO: 18042 - protein, 59 aa, Artificial Sequence
  Synthetic
EKALREVRDLLRRIEERVKKLIEDNRKLLEDARRESERLSEENKRVLEKIEREVKKLED

SEQ ID NO: 18043 - protein, 60 aa, Artificial Sequence
  Synthetic
SRVEEVLKKLEDLLRRLEEVSERSLRELRELVKRLEDVVRRSEKKLKELADRIEEVVRRR

SEQ ID NO: 18044 - protein, 59 aa, Artificial Sequence
  Synthetic
KKALDDVRRLLEEIEKRVTELIERNRRLLEEAEDRVRKLLRDNEELLKRIEKLVRDLER

SEQ ID NO: 18045 - protein, 60 aa, Artificial Sequence
  Synthetic
SRVEEVARKLEDLLRELKRVSDESLKTLEKLMTDDERRVRESLDKLRELAREIDEVVRRR

SEQ ID NO: 18046 - protein, 59 aa, Artificial Sequence
  Synthetic
EDALREVRRLLERAEELVRELIKRNEDVLREAKRTSDELSERNRRLLERIKETVDRKRK

SEQ ID NO: 18047 - protein, 57 aa, Artificial Sequence
  Synthetic
REVEEILKRIEELLRRIKKLSEETLREIAKLLEDIKRLSEETLKSNKDLLKRVRDEL

SEQ ID NO: 18048 - protein, 59 aa, Artificial Sequence
  Synthetic
SRMLREIERIIKELKELVDKLLEDNERLIERLDREVKRLLEENEKSVREASREIDERRR

SEQ ID NO: 18049 - protein, 57 aa, Artificial Sequence
  Synthetic
DEVEELLRRIERLVEEARRLVEELLETNKKLLKDIEKLSRDTLKSNEELLREVKDRV

SEQ ID NO: 18050 - protein, 59 aa, Artificial Sequence
  Synthetic
SEMLRRLETIIREAERDLRRLLKEARDSVKKVSDEIKRLLEENKRSVDRVSREIKRVEK

SEQ ID NO: 18051 - protein, 59 aa, Artificial Sequence
  Synthetic
DEVEELLKEIRELIEEARRRIEELLKEDRDIVRRVTELSRRTLEKIKDLIRKIKDIADR

SEQ ID NO: 18052 - protein, 59 aa, Artificial Sequence
  Synthetic
SEMLRRLEELIKEIEDLVRKLLEELKRSVRETEERVRKLKEDNDELIKRIDELVKEREK

SEQ ID NO: 18053 - protein, 60 aa, Artificial Sequence
  Synthetic
SSLDDLRRLAEELLRTNKKLMEDLRRTNEKLIKEIEDVLRRIRESSKRIKEEVDKLTRDV

SEQ ID NO: 18054 - protein, 59 aa, Artificial Sequence
  Synthetic
RKVLERVKEAVDEVRRSVEESLRDAKRMDEETRKTVEDVRREVTKSVEDVKRRIDESRK

SEQ ID NO: 18055 - protein, 60 aa, Artificial Sequence
  Synthetic
DEVDEVVREVERLLEELRKENDKSVEEDKRLVDKLREEVKRILEEVRKLLEDLARKAKED

SEQ ID NO: 18056 - protein, 59 aa, Artificial Sequence
  Synthetic
KDVLRKLREVIKEVERIAEEVVRKNKDSADKSRKIIEDVVRALKKVVDDVRKIAEDLSR

SEQ ID NO: 18057 - protein, 61 aa, Artificial Sequence
  Synthetic
DEVEKAVRESEETVKDIRRRNDETVRRLRELAKRLKERNEESVRRLRDLLRRLDEEVARRG

SEQ ID NO: 18058 - protein, 59 aa, Artificial Sequence
  Synthetic
ERVLRDIRRVMEDSERIVKEVLDRNRKVAEDVRRIVEEVLRVNEDVLRKIEKRVRELKK

SEQ ID NO: 18059 - protein, 59 aa, Artificial Sequence
  Synthetic
SELEEIKKRVDRALEENNKLLKEIEERVRKSNRDNERLLKEIEDRVREVTERIKKVEEE

SEQ ID NO: 18060 - protein, 59 aa, Artificial Sequence
  Synthetic
EDVLKKIRDLAREVEENVRESERKIKKLAEDDNRSVAESLREIKRLADEVKRRVDEARK

SEQ ID NO: 18061 - protein, 60 aa, Artificial Sequence
  Synthetic
SELEEVRKRVKDVNRKNKELLDEIERTVRELLEDDRRLVDEAKKELDTLLRDIERLRREG

SEQ ID NO: 18062 - protein, 59 aa, Artificial Sequence
  Synthetic
EDALREIRRLLEEVRKSIEDSKRLIEELLRRLKKVTDESRKKVEDLLREVEREVREAKK

SEQ ID NO: 18063 - protein, 60 aa, Artificial Sequence
  Synthetic
RELEEIEKELKRMLDENRRLLERIEEEVRRLNEDNRRLLEEIEKTVEDLLEKIRKLSKEG

SEQ ID NO: 18064 - protein, 59 aa, Artificial Sequence
  Synthetic
REALKRIEELLREIEEVVKRSKTEIERLLRELEESVRRSDERIERLLKRVKDVVDEEER

SEQ ID NO: 18065 - protein, 60 aa, Artificial Sequence
  Synthetic
EKEKEITKTLEDLIRKNRKLLEEIERRVKEVLKRDRELLEEIERRVADMLRRIRDVLRKG

SEQ ID NO: 18066 - protein, 59 aa, Artificial Sequence
  Synthetic
REVLERIKRLLEKVEKVSTESAKRIEELLEEVKRVTDDSKRRVTELLREVERVVDEVRR

SEQ ID NO: 18067 - protein, 60 aa, Artificial Sequence
  Synthetic
DTLRELAKKAKELDDRNRKLLETVEELVRRVNEKNKDLLRRVRELARELLDRLRKLAREG

SEQ ID NO: 18068 - protein, 59 aa, Artificial Sequence
  Synthetic
EEVRRELERLVRKLEESVRKSRKDVEDLITELKKSVKESLKEIEDLVRRLREVVKEIER

SEQ ID NO: 18069 - protein, 61 aa, Artificial Sequence
  Synthetic
EEVDRILKESEDTIREIRDRVRKMLETSKKTVEEIKRRVDRALERDKKLVEDLRERVERTG

SEQ ID NO: 18070 - protein, 59 aa, Artificial Sequence
  Synthetic
KEAVEKMRRIVRESREVVARIREDIKRVLDESDKVVKDLKRAADRSVEEVKKVVDDIKK

SEQ ID NO: 18071 - protein, 60 aa, Artificial Sequence
  Synthetic
SELERLKETSKDTIKKIKDLLRELKKTVDDVIERDKTLLDDLREKVERVIRRIEELLKRT

SEQ ID NO: 18072 - protein, 59 aa, Artificial Sequence
  Synthetic
EKVRDEIRKLIETNKRVADRVEEEVRKLIEDSERSLRKSEKDVKELIKKVEEVMEEVRR

SEQ ID NO: 18073 - protein, 60 aa, Artificial Sequence
  Synthetic
SIEETVKRLIEEIERVLRDARRESKRLSEEDKKVLDEIREEVRKLEEKIKTVLDKARKDI

SEQ ID NO: 18074 - protein, 59 aa, Artificial Sequence
  Synthetic
EKLLDEVRRRVEEVIKELEELLRRDKERVDRSIRELEKLLEEIKERVDRMIKELEDRLR

SEQ ID NO: 18075 - protein, 60 aa, Artificial Sequence
  Synthetic
REVEEADKTVKELIKRNKELLDRIKKEVDELIRRDKELLDKAERDVDRLIKELRDVAREG

SEQ ID NO: 18076 - protein, 59 aa, Artificial Sequence
  Synthetic
KEVVDEIRRLLRELEKVSEDTKREIRELLKRAEESVRRVTERIERLLKELRDVIREIEK

SEQ ID NO: 18077 - protein, 60 aa, Artificial Sequence
  Synthetic
DELEKIKKDVKKMIRDNEDLLRRVEERVRELNRRNEELLKEIEKRVEELIKRLEDVARRG

SEQ ID NO: 18078 - protein, 59 aa, Artificial Sequence
  Synthetic
REVLEAIRRLEKEARDVSRRSTRKIEELLETSETSSEKSKRRIEELLRRLERVVEEARK

SEQ ID NO: 18079 - protein, 60 aa, Artificial Sequence
  Synthetic
EELERAAERIEELLRSNRDLADKITKLSRETLEKIKDLLRKIEKEVRELLERIKDLERRL

SEQ ID NO: 18080 - protein, 59 aa, Artificial Sequence
  Synthetic
EEVLRELERLLRELKKSVDELSRLIEELLRENKRLIDEVKKRIDELLEELKKLIEKVKK

SEQ ID NO: 18081 - protein, 60 aa, Artificial Sequence
  Synthetic
EIEKVVEEVIRRVRKVLEEVERSVRDTIERIKDVLRRVEEVVRRTDKTIRDVLDRIRKEI

SEQ ID NO: 18082 - protein, 56 aa, Artificial Sequence
  Synthetic
DEDIRRVLEDIRRELKRIVDENRKLAEEIIRTLERMVEKNKELMKEVVKKLEEDSR

SEQ ID NO: 18083 - protein, 60 aa, Artificial Sequence
  Synthetic
RIKETVDKVIEEVRRVLEEVRTTVKRTDERIKEVLEEVEETVRRTLEEIRRVLEELERAI

SEQ ID NO: 18084 - protein, 56 aa, Artificial Sequence
  Synthetic
DEDIRDLVRKIKEELRRIVEKNRELMEKVERELRRIVEENERLARRIKEELDRDMK

SEQ ID NO: 18085 - protein, 60 aa, Artificial Sequence
  Synthetic
RIEEIVERLIREVEKVLRDVERTVDKTDRKIREVLEEVRRISDESIKEVREVLEDLERKI

SEQ ID NO: 18086 - protein, 56 aa, Artificial Sequence
  Synthetic
DEDIRRLAEEIKKKLKRMVERNKELMERIEREIREIVERDKELVERIKRKLRELAR

SEQ ID NO: 18087 - protein, 60 aa, Artificial Sequence
  Synthetic
SIEDVVREVIKRVEDVLRRVEEVSRETIERVRRVLREVEERVERTDERIRRILDKLAKSI

SEQ ID NO: 18088 - protein, 56 aa, Artificial Sequence
  Synthetic
DEDIRRLVKKIEEDLTRIVERDKELLEDIERELRRMVEENERLLEEIERRARDEER

SEQ ID NO: 18089 - protein, 59 aa, Artificial Sequence
  Synthetic
EELERLARDVDKRVEDLKDDIRKIREEVKRLLDDNRRRAEEILEESRKSLETLTDLMRR

SEQ ID NO: 18090 - protein, 56 aa, Artificial Sequence
  Synthetic
SEIVKRVLEKLDEVLKDLKRTIDELKKRLEDVLRESRDIARRALEENERVLDELRK

SEQ ID NO: 18091 - protein, 59 aa, Artificial Sequence
  Synthetic
SEEDRIAEESRESLEKLKDDIRKIEDRVRKLLEDNKRRAEEILREVEEDLKRIEELFKQ

SEQ ID NO: 18092 - protein, 56 aa, Artificial Sequence
  Synthetic
SEIVRRLLEENKRVLDELEKRIEELLRRLDKVLKESERIAREAERKIEEVLRKLEK

SEQ ID NO: 18093 - protein, 60 aa, Artificial Sequence
  Synthetic
SAEEIIDRVTKEAKKSIDRTRDRITKLRRELEESIRRSRDIITKLLEELRRVVEEVKRDK

SEQ ID NO: 18094 - protein, 59 aa, Artificial Sequence
  Synthetic
EKVVEDLERKVEEIVREDEDLVRRLAEEVKRVVEDDERTAKKLEDDVRRIIEAVKRELK

SEQ ID NO: 18095 - protein, 56 aa, Artificial Sequence
  Synthetic
SLEELLEEARKTVERLIRESERVLRESEERVRRLIEELERVVRETRKRVKEVIERV

SEQ ID NO: 18096 - protein, 56 aa, Artificial Sequence
  Synthetic
EEELEKLLREIEERVKEMLKRDEDTLREIERKVKEAVRDSERTLEEIEKRVTEEKT

SEQ ID NO: 18097 - protein, 59 aa, Artificial Sequence
  Synthetic
SITEEIKDIERKVEKLIRELDEENKRILETLEREAKDVLRRIEDINEKLHRRARDLKRK

SEQ ID NO: 18098 - protein, 59 aa, Artificial Sequence
  Synthetic
EELKRVLDRVLKKVEDLLRKLEKSVRDSERRLEELLRELREVVKRVRDNIEKVLEELER

SEQ ID NO: 18099 - protein, 60 aa, Artificial Sequence
  Synthetic
SIREEAREELKRLEEEAERLDRENREILKELTREFKELLKESRDINREIHERIRKLKKDG

SEQ ID NO: 18100 - protein, 59 aa, Artificial Sequence
  Synthetic
RKLDKVLKEIEERLRELLKRLEDSVRESEKRLRDLLRELAKVDEEAKRNVEKVLKELED

SEQ ID NO: 18101 - protein, 59 aa, Artificial Sequence
  Synthetic
SIKDEIRKLLEKVKREVEEIDDRNRRLLEKVKREAEELLEKNRRLLEEVRKRAEELKDS

SEQ ID NO: 18102 - protein, 57 aa, Artificial Sequence
  Synthetic
LERVVRDVERRIEELIRKLERSVDRSEEEVRRLIEELRKSVEDSKREVDRVVEELRR

SEQ ID NO: 18103 - protein, 59 aa, Artificial Sequence
  Synthetic
SILEDVRRLLDEVKKLVEELLRENRRLLEEVKKEVEKLDRKNRELLREVRELVKELKDS

SEQ ID NO: 18104 - protein, 59 aa, Artificial Sequence
  Synthetic
RKLEEAVREVEERVRDLIRKARESVDESRKRIEDLIRELKKSVEESLRDIERLIKELRD

SEQ ID NO: 18105 - protein, 59 aa, Artificial Sequence
  Synthetic
STREDARRLVERVRKEVKRLLKKNSDLLREVTERVKTLNERNRRLLEEVEREAKRLKDS

SEQ ID NO: 18106 - protein, 57 aa, Artificial Sequence
  Synthetic
LERVVREIEKEIRDLIRELEENVKTSEKLIEDLIRELEKSVDESRKRVEELVKELRT

SEQ ID NO: 18107 - protein, 60 aa, Artificial Sequence
  Synthetic
SAEDVVREIEKTVRELMRRVEESVRKVEEDVKRLIKEVKDSADESEKKVERLLEEVKREK

SEQ ID NO: 18108 - protein, 56 aa, Artificial Sequence
  Synthetic
EEELRRLLEEIKKEVDKVIRENEETLKRIKEVVERVIEDNKRTLREIEEEVRRIRK

SEQ ID NO: 18109 - protein, 60 aa, Artificial Sequence
  Synthetic
SVEEVVKRILETIKDLMRRIKKNSEDVLETIKRLADEIRESVKRSNERIRELIKDIRETR

SEQ ID NO: 18110 - protein, 56 aa, Artificial Sequence
  Synthetic
TDELEKLLREVEEIVKDVSRKSDTSLKKAEERVRDVKRKDEKTLRDAEEVVRREKK

SEQ ID NO: 18111 - protein, 59 aa, Artificial Sequence
  Synthetic
SVEDLVRDVRDKAKRTSDEIRKLIERSKEIFERSSREIRRLIEESRDTARRVVEKLKKN

SEQ ID NO: 18112 - protein, 59 aa, Artificial Sequence
  Synthetic
EEEIARLVEEVKRLVKESLELIEELHRRSEKLVRDSLREIKTLNDESRKIVTDVLREVT

SEQ ID NO: 18113 - protein, 59 aa, Artificial Sequence
  Synthetic
KVEELVREVTEIARKVREDLERLVRESERRMRESSEKIKRLIEESRRRMKEVVEELKRE

SEQ ID NO: 18114 - protein, 59 aa, Artificial Sequence
  Synthetic
EEEIKRLREKVKRLVDKVKREIERLNRKSRELVKKSEEDIEKINRESRELLRKVLEDAK

SEQ ID NO: 18115 - protein, 59 aa, Artificial Sequence
  Synthetic
DVEELIKEVKDKAKRTSDEIKKLIDESKRVLDEVVRRLEELVKRIKESADRVLEEIARE

SEQ ID NO: 18116 - protein, 59 aa, Artificial Sequence
  Synthetic
RKIAKKLVDDVERRLRKSLRLIEELNKESRDIVRELLRLIEELLKEVEELVERLLREVK

SEQ ID NO: 18117 - protein, 59 aa, Artificial Sequence
  Synthetic
SELEKVLDEVRKRAKESLRRSEELAKRVEEMDERNLRNSKELRERVEEVIKRLLEVARQ

SEQ ID NO: 18118 - protein, 56 aa, Artificial Sequence
  Synthetic
SRVLEEVERIVKRVLDEDKKVLDRLRRSVERSSRESEKVLDELKKRVDRVLDEVRR

SEQ ID NO: 18119 - protein, 59 aa, Artificial Sequence
  Synthetic
SELEKVFEDVKRRLDESLEKSKELLKRVRDTDRENLKNSKRLLERNKRLVDDLLRVVEA

SEQ ID NO: 18120 - protein, 56 aa, Artificial Sequence
  Synthetic
SRLLEELEKRAKKVLDDDKRVLDEARRSSKRVTDEDRKVLKTAEDINREVSKRIRD

SEQ ID NO: 18121 - protein, 59 aa, Artificial Sequence
  Synthetic
SELEKVVDDVRRRLDRLLETSEKLLEDATKRLKDSERKSDEIVKTNEELLERLKTVLER

SEQ ID NO: 18122 - protein, 56 aa, Artificial Sequence
  Synthetic
SELLKRVEERIKRVLDESKKILKEIADEVRRVLERDKELLKRLEDKNREVSERIRK

SEQ ID NO: 18123 - protein, 59 aa, Artificial Sequence
  Synthetic
SELEKVVKEVADLLRRNLEKSKRVLEEVRRRLEENLRESEKVHDDNRKTARRILELVRE

SEQ ID NO: 18124 - protein, 56 aa, Artificial Sequence
  Synthetic
SRLLEELEERVRESIERSRRFIEELEKIVEETLTESEKLARASSEITKTVLDEIRK

SEQ ID NO: 18125 - protein, 59 aa, Artificial Sequence
  Synthetic
RELEEVFKEVEKELRDNLRKVEEVLREVRERLKENLDRSKEVLKDVRRRIKELLDLARG

SEQ ID NO: 18126 - protein, 56 aa, Artificial Sequence
  Synthetic
SKLLERLERKVEETLRRSREVIEDAKRIVEETLRRSEDIIREAKEIIDDVLEKIRR

SEQ ID NO: 18127 - protein, 60 aa, Artificial Sequence
  Synthetic
STDDALRKIERRHKELTKEVRDMLRKVDEEVKRLIEENEDVLRKLREEVDRVIKDIRRAD

SEQ ID NO: 18128 - protein, 56 aa, Artificial Sequence
  Synthetic
LEDLRRDSERIIEEVKRRLDELRREVEKVIDDVRRLSEKNEKDARRIIEEVKRRLD

SEQ ID NO: 18129 - protein, 60 aa, Artificial Sequence
  Synthetic
STEEVLDEIRKLHKTLTEDIKRVLREIEELHRRTIEENKEVLDKIREDYKRVIDDVRTKD

SEQ ID NO: 18130 - protein, 56 aa, Artificial Sequence
  Synthetic
AEELLRESKEAIKEVKRVLEELRKESKRVVDETRKLSEENLEHSERVLRKVEEDLR

SEQ ID NO: 18131 - protein, 60 aa, Artificial Sequence
  Synthetic
DEDKVLRKVKKLVEDIRREIERILREAERLHKELTRRNEEVLERIRRLVDKVIKEIRKAD

SEQ ID NO: 18132 - protein, 56 aa, Artificial Sequence
  Synthetic
LRELLERVERVIREVRRDLKRLLDESRDVVRRVEERSRRNLEEVKRDIERVKRELD

SEQ ID NO: 18133 - protein, 60 aa, Artificial Sequence
  Synthetic
SKEEVLREIERLHKETIRRIEEVLREATELHKRLTETNKRVLEDLEREAREVIEDVRRAD

SEQ ID NO: 18134 - protein, 56 aa, Artificial Sequence
  Synthetic
ARELLEESRREVERSEKEVERLLRKSRKVVEEVRKLSEENDREVKKILEEVKRRLD

SEQ ID NO: 18135 - protein, 60 aa, Artificial Sequence
  Synthetic
SKEEVLDEMRRLHETTKRDIRRVLKEIEELHERTLRENKRVLEEIKELVRRVIEDIKRKK

SEQ ID NO: 18136 - protein, 56 aa, Artificial Sequence
  Synthetic
LKELLDESRRVVKESKEDLDRLLKESRDVVDDTRRKSEKNLRDAERVIREAEEAVR

SEQ ID NO: 18137 - protein, 60 aa, Artificial Sequence
  Synthetic
DRERVLREMERLVRELLRENREVLDEIRKLHERTVRRNRELAKRLEEEAKEVIDRIEKTK

SEQ ID NO: 18138 - protein, 56 aa, Artificial Sequence
  Synthetic
VKKLLEEARDVIRRAKEKSKRNLDESRRVVKETDDLSEKNREDVRKIIKEVEEELK

SEQ ID NO: 18139 - protein, 60 aa, Artificial Sequence
  Synthetic
DVEEVLREIEELHRRTIERIKKVAKKVREDVKRVLDENKKVLDELRRRVEEVIEKIKKAD

SEQ ID NO: 18140 - protein, 56 aa, Artificial Sequence
  Synthetic
MRELKKRSDDVVRESEKELRRLEDEIRKVIEDLKKLSEDNEREVEKVIRKVEEDLR

SEQ ID NO: 18141 - protein, 60 aa, Artificial Sequence
  Synthetic
DMERIVDTLRKLNTDSNRRSKEAIDRLRKTNKDSLDKVEEVLREAERLAEDVLRKVEEKV

SEQ ID NO: 18142 - protein, 59 aa, Artificial Sequence
  Synthetic
KEVLKKLLEEVKDSNRRSEEDVRRMEEEVKRSNDELLKELKEILDKVREAIKKLEEKVK

SEQ ID NO: 18143 - protein, 60 aa, Artificial Sequence
  Synthetic
SAEDIIRRLRDLNRRSNKKSRDVAEKLRRDNKRTLEKVERKARELKKLAEEVVKEVRDKV

SEQ ID NO: 18144 - protein, 59 aa, Artificial Sequence
  Synthetic
EEVLRRMLKEVEDSNRDSDRDVRRIEEEVRRLNEELDKKLEDLEREVRRMIEEIRRKVK

SEQ ID NO: 18145 - protein, 61 aa, Artificial Sequence
  Synthetic
SELEEVKERVERVLKRIRDLTRELEDRVDKILEKSKRTLDELEKRVREVIARIKELVKRLK

SEQ ID NO: 18146 - protein, 56 aa, Artificial Sequence
  Synthetic
SEVLKRLEELAREVIEEDKRALERLDRKIRRVLDESRDVLRKIRKLIEDVLREVEK

SEQ ID NO: 18147 - protein, 61 aa, Artificial Sequence
  Synthetic
SESETIEKEADEMLKRSKKTLEELRKTVKRILERIEKLTRDLEKTAEDIIRKIEDDLRRLK

SEQ ID NO: 18148 - protein, 56 aa, Artificial Sequence
  Synthetic
SEVAKRISEKIRRVLEDSRRVLEELEDLIRRVLERDKRALERIKEDIDRIIRRVRT

SEQ ID NO: 18149 - protein, 61 aa, Artificial Sequence
  Synthetic
SELEAVLDELRKLVKELEDRLRKVNEESRRLIKELLDRLREVDERSRKLIKDLAEKARRRG

SEQ ID NO: 18150 - protein, 56 aa, Artificial Sequence
  Synthetic
TDELRKRVRDLVRRVDELIKRSKRHAEELTREVEEKVRESEEHVRRLVKEVEDRIR

SEQ ID NO: 18151 - protein, 56 aa, Artificial Sequence
  Synthetic
DEVEEADKRVEDEVRRLKRLVEEHTKRVEDKVRTLKKLVKEHTDEVRRAVEELKRR

SEQ ID NO: 18152 - protein, 55 aa, Artificial Sequence
  Synthetic
EDVLRKVKELLEDVARLVEESHEEARKLLKEVEDRLRESVREVEELLRDVERRTR

SEQ ID NO: 18153 - protein, 59 aa, Artificial Sequence
  Synthetic
DEVEKVKEEIRRIVKELEDRVEEHKKEAKKIIDELRRLVKRHREEVEEIVKKLEELVRR

SEQ ID NO: 18154 - protein, 55 aa, Artificial Sequence
  Synthetic
EEVLKEAEKLLEDVERKLRKSHEDLERLLKEVEEAVRDSNEEVRERLDRVREKMR

SEQ ID NO: 18155 - protein, 59 aa, Artificial Sequence
  Synthetic
DEDRKVEEDIRRIVKRLREIVEKHNREAREIIKRLRDEVRKHRDKARKIVTRLDELIKR

SEQ ID NO: 18156 - protein, 55 aa, Artificial Sequence
  Synthetic
KDVLKEAEELLEKVKRDLDRSHEELEELLKRVREELEDSNRELEKLIEEVERKVR

SEQ ID NO: 18157 - protein, 59 aa, Artificial Sequence
  Synthetic
SEVEDVDDRIRKIIKKLEDLVRKHNEDARRIIDELRELVERHNRRAREIVRELEDLVRR

SEQ ID NO: 18158 - protein, 55 aa, Artificial Sequence
  Synthetic
EEVLKKVEKLLKEVLDLMKESNEELEKLLEEVKREMEESVKELKKLLDEVREKVK

SEQ ID NO: 18159 - protein, 61 aa, Artificial Sequence
  Synthetic
KEIEDVLEKVRKVVTDLKKKLEDVNRESEKLVREVVKELKRVDDESRKLVERVEKEADEKG

SEQ ID NO: 18160 - protein, 56 aa, Artificial Sequence
  Synthetic
EEELDRRIKELKDRADKLIKDSKDNVEELRKKAEELIRRSRKNVEDLVRKATEDVR

SEQ ID NO: 18161 - protein, 61 aa, Artificial Sequence
  Synthetic
RELEEVLKKVEDLHRDVMKKIDDVVREASELHKKVKEDIDEVVKRAEDVLRRVKRELDKRG

SEQ ID NO: 18162 - protein, 56 aa, Artificial Sequence
  Synthetic
KDELDEHIERSLRKVTELVKDLKEHIERSLEEAKELVRRLEELIEELLRRLAEEVR

SEQ ID NO: 18163 - protein, 60 aa, Artificial Sequence
  Synthetic
SEVEEVLREAEELLKEVRDRLRESVEKSKRLLDEVRRKIEESHRRHKELSDEIRRLAEER

SEQ ID NO: 18164 - protein, 56 aa, Artificial Sequence
  Synthetic
IEELRKEIKKKIDEMRRLVKEDTERLERVAEELRRRVEEDKERSKDVVRRLREDVK

SEQ ID NO: 18165 - protein, 60 aa, Artificial Sequence
  Synthetic
SEVEEVLKRAEELLDDVRRLLERSHRETERLLDEVRKRVEDSHREHRKLSDEVRRKAEER

SEQ ID NO: 18166 - protein, 56 aa, Artificial Sequence
  Synthetic
IEELRKDIERAVKELRERVEENTRRVEELVRRLRELVEEDRKRSKEVADEMDERVR

SEQ ID NO: 18167 - protein, 60 aa, Artificial Sequence
  Synthetic
KEVEEVLDTAKKLLDEVRRELERSHEEHKRLSDEIRERLERSHEETERLLKEVKEEVDDK

SEQ ID NO: 18168 - protein, 56 aa, Artificial Sequence
  Synthetic
IEELKRRIDDMVRRLRELVERDRRESKKVADDLRRLVKENTERAREKIEELRKDVE

SEQ ID NO: 18169 - protein, 60 aa, Artificial Sequence
  Synthetic
SEIEEVLKEAEKLLREVEKELRRSHEELKRLLKEVRDKVRRSMEESERLLEEIKKKADER

SEQ ID NO: 18170 - protein, 56 aa, Artificial Sequence
  Synthetic
IEELKRRIEDAARKLEKLVKDDRERIERKVRELERLVEEDKKRLRDRVRKMDEDVR

SEQ ID NO: 18171 - protein, 60 aa, Artificial Sequence
  Synthetic
REVEEIVKKVRKEVTRLLREVEEDMKRNRDTIRELLKYVKKDLEENKDIIRRLLELIRRD

SEQ ID NO: 18172 - protein, 55 aa, Artificial Sequence
  Synthetic
EEARKDIERLLEEVRTKLRENEEDLRRLVKEVDRELKRNRDELERLAKEVRDELK

SEQ ID NO: 18173 - protein, 61 aa, Artificial Sequence
  Synthetic
SEAEEIAKEVEKRIRELLDRVRRMVEESEKYARDSLRKIKRLLDEVRRRIEELLRKIRRDG

SEQ ID NO: 18174 - protein, 55 aa, Artificial Sequence
  Synthetic
SEVAKKVKELLDEVERILREWEKEDRRLLKESEDLLREVEKEVRKLLRRVEEELK

SEQ ID NO: 18175 - protein, 61 aa, Artificial Sequence
  Synthetic
SESEKILEEAKRRIRKLLEDVKEMVKRSRDYARESLKRIKDLVEESKREIDKLLEEIKRSG

SEQ ID NO: 18176 - protein, 55 aa, Artificial Sequence
  Synthetic
SEVEEDLKRLLEEVKRELKRWEEDDKRLLDDSERALKEWEDTDRRLLKRVEDELR

SEQ ID NO: 18177 - protein, 61 aa, Artificial Sequence
  Synthetic
SEVEEIVKDAERYIKESLDRIRKAVEESRRRITELLKEVERLLREVRKRIKELLDEIRRDG

SEQ ID NO: 18178 - protein, 54 aa, Artificial Sequence
  Synthetic
DAERKLEELLEESRELLKRWRDDDKRLVDDVRRKLKEVEEEVRKLLKEVEDELR

SEQ ID NO: 18179 - protein, 61 aa, Artificial Sequence
  Synthetic
SEVEEIVKEAKRRIDELLKKVDELLKESERYARKSLKDNKDMVRRSEERIRELLEKIKRDG

SEQ ID NO: 18180 - protein, 55 aa, Artificial Sequence
  Synthetic
SEAEKRLKDLLDRVKEKLDEVRRRDRELLEESKDLSRRWKERDDRLLEEVEKALK

SEQ ID NO: 18181 - protein, 57 aa, Artificial Sequence
  Synthetic
REIEKIREDLERLLEEVKRAAEEWRRRDEELVRKLEELIKRVLDEDRRLLRELRDKG

SEQ ID NO: 18182 - protein, 59 aa, Artificial Sequence
  Synthetic
REVIKKVLEEIRDKIRKILKTIEDLVRKSEDLIRRVLEEIERILDESRRDVEEVKRREE

SEQ ID NO: 18183 - protein, 56 aa, Artificial Sequence
  Synthetic
DEDRRVKTEIKKLLEELTRRSREVEEDDRRLLDELTRETERIEEDLRRLLEEVRRS

SEQ ID NO: 18184 - protein, 55 aa, Artificial Sequence
  Synthetic
DEIEREVRKVEEDYRRSLRRVLEESRKIAERYKKKLDEMREEVRRRAKKVKDEVR

SEQ ID NO: 18185 - protein, 56 aa, Artificial Sequence
  Synthetic
KSVEKIVEDIKRVADKILEDIKRSEDRVREIVDRHRREIDKVVKEIVKRVEDLKRN

SEQ ID NO: 18186 - protein, 59 aa, Artificial Sequence
  Synthetic
KDEMEDLKRRVDELKKEIERALKEHKDKVKKLLDDLRRLNEELRREVRRVLEEVRETTR

SEQ ID NO: 18187 - protein, 63 aa, Artificial Sequence
  Synthetic
DEIERVEEALKKVEKDLRRLIRELEKLNDKIERDIRRLHEETNKRLKEVREKVEDMIRRVSAR

SEQ ID NO: 18188 - protein, 59 aa, Artificial Sequence
  Synthetic
RRVVKKLLDEIEEILRRLKKLVDDHARESKRILRESERKVEALLEEIEEILKRLEEKVK

SEQ ID NO: 18189 - protein, 60 aa, Artificial Sequence
  Synthetic
DEIERVLREIDELRKKVEKVIEDSRRNAKRWLDRVKRTAEELNKLSDELLEEVTRLAEAG

SEQ ID NO: 18190 - protein, 59 aa, Artificial Sequence
  Synthetic
SRAMEEVRKTAEEVIKTVDKLLKELRKTYEDILRDIDRLLKEHHARNRRVLEEVERLTQ

SEQ ID NO: 18191 - protein, 56 aa, Artificial Sequence
  Synthetic
SEREEVKKRLDDVRREAKRLLDEVRKRLEESHRKHKKLLDEVRKRLKEVEEEAKRR

SEQ ID NO: 18192 - protein, 56 aa, Artificial Sequence
  Synthetic
KEKVTKIIEDLKRELEEMFRKLKRLVEEDDRRSKESLEEVRKLVEDARRKIEEDTR

SEQ ID NO: 18193 - protein, 60 aa, Artificial Sequence
  Synthetic
SSIEKLKKVVEDIKRRSEDLNRELEKVVRDVKKRSEELNEELRKVSEEIERRLRELLKRI

SEQ ID NO: 18194 - protein, 55 aa, Artificial Sequence
  Synthetic
ERFVEELRRALKKDEDDMRRVVEDIERLLEEDERRMKKAVEDHRRLLEELEERAK

SEQ ID NO: 18195 - protein, 56 aa, Artificial Sequence
  Synthetic
DESEELKKVLKEIEDEVRRLIREIERVLEEIERRDRELLKRDEETLKRIEEEVRKL

SEQ ID NO: 18196 - protein, 55 aa, Artificial Sequence
  Synthetic
EEIIEELRRILKEAEDVIRRIIEEVRDVLRESEKRVRESIDENRKILEELRRRAK

SEQ ID NO: 18197 - protein, 56 aa, Artificial Sequence
  Synthetic
DEEDRLRRELEKVRRDADRLLEEIRRVLEEVERRSKELLKRDEDSLREIVRTVTEE

SEQ ID NO: 18198 - protein, 55 aa, Artificial Sequence
  Synthetic
DEVLEEIRRILEELRKEAEDIIRRIRELLRELEKNVTDSIRRNEEMLKELRRKVK

SEQ ID NO: 18199 - protein, 59 aa, Artificial Sequence
  Synthetic
SEAEKILEDMKRYIEEHIERVKRSLEENKKKDRELIEKSRKSLEDARKKIRELLELVRQ

SEQ ID NO: 18200 - protein, 56 aa, Artificial Sequence
  Synthetic
EEILKRIRDLVKELEERDRRVIEEMKKSNKRTEDTDREVLERIRRLVERLADEARK

SEQ ID NO: 18201 - protein, 60 aa, Artificial Sequence
  Synthetic
SELERVIEEIKRLLERLKRENEEVKKRVKKLLDELRKINKDVEDTVRELLKRVKELVDRA

SEQ ID NO: 18202 - protein, 59 aa, Artificial Sequence
  Synthetic
KDEIEEALRRVEEHIKRHLKTVKELAEKAERHIREHLKEVKRMLEKAKRTIDELLKKIK

SEQ ID NO: 18203 - protein, 57 aa, Artificial Sequence
  Synthetic
SLREAAKEVLERVRREVEKLRKSNEEVLTRVREEVKKLLETNKDVLRRVAEILKTAN

SEQ ID NO: 18204 - protein, 55 aa, Artificial Sequence
  Synthetic
EEDIREIEDILRKIAETVETLNRRLEDILREIRKSSKKTIDELREKAKELEDRTR

SEQ ID NO: 18205 - protein, 61 aa, Artificial Sequence
  Synthetic
SEVDEDLKDIKRYLDEHRKRVEEVVKRLEDRSRETAREVEEDVKRIERKVEEAKKEADERG

SEQ ID NO: 18206 - protein, 59 aa, Artificial Sequence
  Synthetic
EDAKRRIEEVLERVRRELERSEEKLRRVLEKHREDNDRLEEELDRVLRELEKILDEVAT

SEQ ID NO: 18207 - protein, 60 aa, Artificial Sequence
  Synthetic
DEVRKILKELKELVKRIEDKLRKYLEDVRREVERIEEEVRRNLERIKRLAEEIERRVRRD

SEQ ID NO: 18208 - protein, 59 aa, Artificial Sequence
  Synthetic
EDVKRKIDKVLDEVRRLLEDIKRRVEKINTDTERLLKKLAEDSKRALEEVKETLERAER

SEQ ID NO: 18209 - protein, 60 aa, Artificial Sequence
  Synthetic
ELRERIKRALDEHRRVSEELERRVREANKRHNEVSKEVKDDLKRSHDELRESLERIKRRG

SEQ ID NO: 18210 - protein, 55 aa, Artificial Sequence
  Synthetic
EEDLKRIREETERLKEDVRRYLRELEKLSRDLRRKVEELLKDNKRKVKEIEDEAK

SEQ ID NO: 18211 - protein, 60 aa, Artificial Sequence
  Synthetic
DELETLEERIRRSVERVRRELKRYKEEMDKHSEDLKRLVDKNLEDVRRELEEIRKLATDG

SEQ ID NO: 18212 - protein, 59 aa, Artificial Sequence
  Synthetic
EDMEKKLRELLERHERENKKAREDVEEANRRNEEVLKDIERRSKKALDDVRRELERVRK

SEQ ID NO: 18213 - protein, 61 aa, Artificial Sequence
  Synthetic
SLKEVLDKIEEDHRRMSKRNEEVLEEVKRRAEKLLKDAEEVLRRVRERIEELIRRVEETKG

SEQ ID NO: 18214 - protein, 56 aa, Artificial Sequence
  Synthetic
VKELKKRADESRKTVERLSRELKKELRKVEEDVKREVEKIEEDLKRIARRVREESR

SEQ ID NO: 18215 - protein, 60 aa, Artificial Sequence
  Synthetic
SELERLLEEVERLLEKLERDNKRLLDDVRRLLERLRRDNERLLEKNKRLLDRLREEVSRV

SEQ ID NO: 18216 - protein, 56 aa, Artificial Sequence
  Synthetic
IEKLAREVKRHIERHKEELDRLRKEVEKNARKHEEDLRRLEERSKKHVEDIERETR

SEQ ID NO: 18217 - protein, 60 aa, Artificial Sequence
  Synthetic
SELEKLLEDVKRLLDELRERNEKVLEDARRLLEELRKRNEDLLRRNRELLERLEREVSKV

SEQ ID NO: 18218 - protein, 56 aa, Artificial Sequence
  Synthetic
IDRVRRRVERHIREHERDLREVKKRIEEDAKRHRDRLKKLEEDSREHVKRMEDRTR

SEQ ID NO: 18219 - protein, 60 aa, Artificial Sequence
  Synthetic
KLEELAKELRRLLEELRKRSKEVIDRLRRLNEELRKTSEEVIRRLRELNRRLTEKARRRL

SEQ ID NO: 18220 - protein, 55 aa, Artificial Sequence
  Synthetic
EEVLRKVREEVKEHERRLEDALRRSKKEIDDHKRELEELLKENAEEVRRVEERIR

SEQ ID NO: 18221 - protein, 60 aa, Artificial Sequence
  Synthetic
KAEELVRELKRLLDKLREESKKVIEELKRRLDEVAKKSEDVVEEMRRLLEELKEKIERRL

SEQ ID NO: 18222 - protein, 55 aa, Artificial Sequence
  Synthetic
EEVLRDVRRKVEDHRRKLDEIRKRVTDEARRHERELEKALEKIRRDIRRIEEELR

SEQ ID NO: 18223 - protein, 60 aa, Artificial Sequence
  Synthetic
KVEDLLREAKALLDELKRESERIIKELRKLNDDLTKKSEEVIRELEKLLRDLKKIVDERL

SEQ ID NO: 18224 - protein, 55 aa, Artificial Sequence
  Synthetic
EEALKKVRKEVEDHKRRLKEAVDRNRKKIKDHEEELERTLRDIRRKIDKERRELE

SEQ ID NO: 18225 - protein, 59 aa, Artificial Sequence
  Synthetic
EELERLLKRVRDESKKNRDKVREDLERSRRKSKRHEDELRRLLKEARDDIDRVRDLRRK

SEQ ID NO: 18226 - protein, 56 aa, Artificial Sequence
  Synthetic
EEVVKEAEKILDDNRKENERVSEEDKELLERNKKKAEDVLRELEELIRKLAEELKK

SEQ ID NO: 18227 - protein, 60 aa, Artificial Sequence
  Synthetic
SELEELLKRIRDKSKENEDEVRTDLKRVRDYARRHEERLRELLERVRDELRKAEELRRAG

SEQ ID NO: 18228 - protein, 56 aa, Artificial Sequence
  Synthetic
ERVLEEIERIMRENKRRNEEVIKEIKELIDRLRRKSERVIEEIKKRIDELRDKARR

SEQ ID NO: 18229 - protein, 61 aa, Artificial Sequence
  Synthetic
EEEREIEERLRKKIEEIRREDKRHHDEVRRKVKEIKEEDREHHERVKRKAEEVKKRIETTG

SEQ ID NO: 18230 - protein, 55 aa, Artificial Sequence
  Synthetic
KDVLRELKRLLDELRESARKNNEDLKRLLEELEESVKRNNDELKKLLDELKERAR

SEQ ID NO: 18231 - protein, 61 aa, Artificial Sequence
  Synthetic
RELEELAERVKRLLERDEELLRRLKDAVRRLSEKDRRLLERLAREVKRLLDELRDLVRKRL

SEQ ID NO: 18232 - protein, 59 aa, Artificial Sequence
  Synthetic
KELLERVITELERKARESEKKHEDSLRELERLARESEERHKRSLEEVERKIEEIKRDLD

SEQ ID NO: 18233 - protein, 60 aa, Artificial Sequence
  Synthetic
RELEKLEDEIRRELRRIEKELKDYERELEERADKDRRDIEDYRRRLEERVKEIEDRLRRD

SEQ ID NO: 18234 - protein, 55 aa, Artificial Sequence
  Synthetic
EELRKILEDALKRVREEVKRILDRNRELLRESEELVRRVLKRNRDLLREVDERVR

SEQ ID NO: 18235 - protein, 61 aa, Artificial Sequence
  Synthetic
DKVREALKRLKDKMETYERRSKKHIEDHKRKLKEYEERVRRNIKRLREELKKLEEDAKTRG

SEQ ID NO: 18236 - protein, 59 aa, Artificial Sequence
  Synthetic
EELLKRVDELARRIMKRIKELNRENERVVRESLKRVDELNKRSEKVHKEVLDRLEELRR

SEQ ID NO: 18237 - protein, 57 aa, Artificial Sequence
  Synthetic
SLKEELEKLVRDIIRDNRRLLEENEELVRRSEESNKRLLEENEETARRIKAELERAG

SEQ ID NO: 18238 - protein, 59 aa, Artificial Sequence
  Synthetic
EKLVEEVKRKLKRKLEEIRREHRRTKEEIKKTNEDIKRRHDETLRRLEKTLEDIKERTR

SEQ ID NO: 18239 - protein, 60 aa, Artificial Sequence
  Synthetic
SEVEKILEELKREVREHERRVEKLVRELEDYVRRHREKVKRIEERLRDKLREIEELVKEG

SEQ ID NO: 18240 - protein, 59 aa, Artificial Sequence
  Synthetic
EKAVREIETLADEIRERIERSLKRIRDLIREIKEDLRRSLERIREIIREIKKAIDDRRK

SEQ ID NO: 18241 - protein, 60 aa, Artificial Sequence
  Synthetic
SEVEKILKEIRDENERLKKEIEEILRELERKLREHRREVEEVLKRIREKIETLKDESRRE

SEQ ID NO: 18242 - protein, 59 aa, Artificial Sequence
  Synthetic
EEMLREMERISREDRETLKRLTDRIREMIRRLEEEIKRSEREAREIIKEAKKVLEDEAT

SEQ ID NO: 18243 - protein, 61 aa, Artificial Sequence
  Synthetic
SRVEELIKDLRRSTKELEDRVRKLLEELKDKTRRTEKRNREKLEKLKEELRKLEEDVKREG

SEQ ID NO: 18244 - protein, 55 aa, Artificial Sequence
  Synthetic
EKVRKVMEDDRRKLKKILDDVEDVLRKHKKVLEDLKRTNDDVLREARKLAEKIRR

SEQ ID NO: 18245 - protein, 60 aa, Artificial Sequence
  Synthetic
SAEERLKEALKRLDDVSKRSEEEIRRMIKRIERISRESLKRLKDLNRRIKELVERIERRL

SEQ ID NO: 18246 - protein, 55 aa, Artificial Sequence
  Synthetic
ERLLEEIKRYIDEHKRRLDELRKDIERYLEEHKERLRELEKRHEELLRTLDREAK

SEQ ID NO: 18247 - protein, 61 aa, Artificial Sequence
  Synthetic
SAEEDLDRMRKKVEDVIREDKERVRKLLERAKEVIRESEKKHEDLRRRIRKVIKEIRERTN

SEQ ID NO: 18248 - protein, 59 aa, Artificial Sequence
  Synthetic
DTDLERELRRIDKHLRDHKDEARKSEERVEDHLRRHRERVRRNEEDVEDKLKKLKDETK

SEQ ID NO: 18249 - protein, 59 aa, Artificial Sequence
  Synthetic
REEEELKRRNKDHNRRHREDTKRIAEDVDRKLREWKKKSDEAREEVKRLLERLKELADR

SEQ ID NO: 18250 - protein, 55 aa, Artificial Sequence
  Synthetic
EDLRRLMKENRETIRESAEILERLRERVEDLVRRDREILEKLLRDIEELAERIKR

SEQ ID NO: 18251 - protein, 60 aa, Artificial Sequence
  Synthetic
SVEDELRKLEERLKRIADELRRLVEKNIEDNKESLKEIEKLIRENIERNKEVLKRIAERG

SEQ ID NO: 18252 - protein, 59 aa, Artificial Sequence
  Synthetic
KDELKKALDDVDKKLEDLRREVEDRDRKNEEDNRRLRKELEERSRENKEFLDKLAREAD

SEQ ID NO: 18253 - protein, 61 aa, Artificial Sequence
  Synthetic
SEKDESARDIEEKLERHLRKSDESRRRNEKRIKEHRDRSDESRKKFETDLKRIEDEVRKRG

SEQ ID NO: 18254 - protein, 55 aa, Artificial Sequence
  Synthetic
EKLKDLERKVREVIDRDRDILRRLEEEHRKVITEDEEILKRLEEKAREAIERIRR

SEQ ID NO: 18255 - protein, 61 aa, Artificial Sequence
  Synthetic
SEKDERLEEIKRRLKEHKRRSEEAVKDNDRKLEKHKRDSDRSAEEVKKKLEEIEKRVRKDG

SEQ ID NO: 18256 - protein, 55 aa, Artificial Sequence
  Synthetic
KKLDDLEREIRKVIEESKRLLEELERRHRRVIEEDKRILDELRRLIEELIEDAKR

SEQ ID NO: 18257 - protein, 61 aa, Artificial Sequence
  Synthetic
SEKDEELKRIKEDLERHERESEDDVRRNEEKIRRHRRKTEEAVKEVEEELKRLEEDVRREG

SEQ ID NO: 18258 - protein, 55 aa, Artificial Sequence
  Synthetic
RDLERLRKEIREVIEKSKDLLRELRRRHEKVIEDSEDILRKLEKKIKDLVDKIRK

SEQ ID NO: 18259 - protein, 61 aa, Artificial Sequence
  Synthetic
SRKDEEVKRVKEKLKKHEERSRDMVRKVEDKSRRHREKIKEAEREVRRRIEELEEDVRRRG

SEQ ID NO: 18260 - protein, 55 aa, Artificial Sequence
  Synthetic
KKLEDLREEAERVIRRSEKLLEELREHVERNIDEVREILRELAELVKRVIDEIRR

SEQ ID NO: 18261 - protein, 60 aa, Artificial Sequence
  Synthetic
SVEDILRTLRRLLEELEEESERILKRLREIIETNVRRVKELLRRLKERLDELAERLKAKV

SEQ ID NO: 18262 - protein, 59 aa, Artificial Sequence
  Synthetic
SKELDDLLKKVEEHLRRHKRKLEKALKDVEDESREHEKELRRALKRIERLLRELERKAD

SEQ ID NO: 18263 - protein, 60 aa, Artificial Sequence
  Synthetic
DEEEVIREIEKRFRDLIRRAEDVLRRIAEKMKRLKDKTRRLLEELRESNRKLIKELRDRI

SEQ ID NO: 18264 - protein, 56 aa, Artificial Sequence
  Synthetic
SKEVRDRVEEELKRIEDRLRKLDTDVDRYLKEHEDRLRKLKEDNERDLKRVEERAR

SEQ ID NO: 18265 - protein, 56 aa, Artificial Sequence
  Synthetic
DIEELLKEVKKEVDRVEKKVKELIDRNKERVDRVREENERVADEVRKLIKELRDRI

SEQ ID NO: 18266 - protein, 59 aa, Artificial Sequence
  Synthetic
RELVEKVAREAREKLKKVEDLLRKISRRSEELLRRNREATKKILKELRELLRRVEEKRR

SEQ ID NO: 18267 - protein, 59 aa, Artificial Sequence
  Synthetic
SEAEEALKRHRKLNKEAEKRAKDATDDSKRLLDEIRKRAKEASEDSKRLLDEARRLREA

SEQ ID NO: 18268 - protein, 60 aa, Artificial Sequence
  Synthetic
KERVRRILEEAKKTARELRERIKKLLKENEDAAKKLRDEIDEAAKKNKKAADEAREEARR

SEQ ID NO: 18269 - protein, 59 aa, Artificial Sequence
  Synthetic
SELEKVLEEHRRLNDEIRKELEDVTRKSEETNKRIEEDLRRVTKEAKDLLERIKEKLEA

SEQ ID NO: 18270 - protein, 60 aa, Artificial Sequence
  Synthetic
RRRVEEILRDMKETVDKLKKEIEKLLEENKESAKELRERIKENLETNRDLVRKLEEDIKR

SEQ ID NO: 18271 - protein, 59 aa, Artificial Sequence
  Synthetic
DEAEKALEEVRDLIREIRERDRKVTEDVERLNREIREKLKEVTERVKRSNDDIRRLLEE

SEQ ID NO: 18272 - protein, 56 aa, Artificial Sequence
  Synthetic
KSILEELERLVRELRKESEKSLEDLERLNKKLEDEVRDILRKLNKLNEDLLRKVEE

SEQ ID NO: 18273 - protein, 59 aa, Artificial Sequence
  Synthetic
SEMDEARKEVKKLLDEVRKRDEDVTRKVEELNKRIEERAKRVAEEVEKLIREILKRLRD

SEQ ID NO: 18274 - protein, 56 aa, Artificial Sequence
  Synthetic
EKILEDLRRLVKKLKEESDRSLERLERLNERLERRIREILKRLEKLVRELRKEVER

SEQ ID NO: 18275 - protein, 59 aa, Artificial Sequence
  Synthetic
SEAEEALRKVEELIRRVKKRDDEAVKEVRELNKRIADILREVLETVRKLLEDVEKALRD

SEQ ID NO: 18276 - protein, 56 aa, Artificial Sequence
  Synthetic
EDILRTLRELVRDLERKSEESLKELNRLNEDLKREVKRVLDELEELVRRLKKKVDD

SEQ ID NO: 18277 - protein, 57 aa, Artificial Sequence
  Synthetic
QVEDVIRESKKLTEDSEKRVRDIIRRLKKTIKDSEDRVRRMVEELRERIKRLRERLE

SEQ ID NO: 18278 - protein, 60 aa, Artificial Sequence
  Synthetic
SDEVIETLLRKDRDLNRRVNEELRKLEEEVEELNRRVNETIKEILRRIAELIRRILEKTK

SEQ ID NO: 18279 - protein, 56 aa, Artificial Sequence
  Synthetic
KVEEILKELEELIKRSKETVDEVIKRSKDLVDESRRRIEDVIRELEKLIRELDKKL

SEQ ID NO: 18280 - protein, 60 aa, Artificial Sequence
  Synthetic
SEEVVRTLVKEIRDLNKRVNEEIKRLLDEDKKLNEEVNRLIKELKKEIEDLIREVLEDKR

SEQ ID NO: 18281 - protein, 57 aa, Artificial Sequence
  Synthetic
EVEDIIRESKKLIEDSKERVKEVIKESKRLIEELERTVREVIKELRERVDRLRKKLR

SEQ ID NO: 18282 - protein, 60 aa, Artificial Sequence
  Synthetic
SKEVLDTLLKEDRDLNEDVKRRITELLEEDRRLIEEVKKRIRELRERIKRVIEEVDRATT

SEQ ID NO: 18283 - protein, 57 aa, Artificial Sequence
  Synthetic
STAEEIVRRIRDVNRRINEAIERLLEEDEKVIRDVERRIEEVLERDRRVIEEVKRRV

SEQ ID NO: 18284 - protein, 56 aa, Artificial Sequence
  Synthetic
ERIIEEIKRILKESEDRLRRILETSRERLKELKKKLERVLEDSKKKLDELRRELRK

SEQ ID NO: 18285 - protein, 57 aa, Artificial Sequence
  Synthetic
REAEDLVRKVREVNKKANRDIKELLDRDEKVIREVARAAEAIVDEARRIVEEVERKI

SEQ ID NO: 18286 - protein, 56 aa, Artificial Sequence
  Synthetic
ERIIKEIKETLDESRKRAEEVLEKSRRLLEELRKRVEEIVKRIKELIDELERRVRK

SEQ ID NO: 18287 - protein, 59 aa, Artificial Sequence
  Synthetic
SAEEIIKTLEELVEKLKRDAEETLRKIEELVRRLEEEARKSSEKIRKLVEDLAKEARER

SEQ ID NO: 18288 - protein, 59 aa, Artificial Sequence
  Synthetic
DEVLTEVLKEITELVKRLKELSDRTLEEVRKLVERVKRESKRTLEEAEEVVRELKERLR

SEQ ID NO: 18289 - protein, 59 aa, Artificial Sequence
  Synthetic
DAERLLREVEELVRRLEEEMEKTDREIKELIKRLEERLRTTSREIKKLIEDLEREARER

SEQ ID NO: 18290 - protein, 59 aa, Artificial Sequence
  Synthetic
REVLKKVIDEIRKLVKRVKDESKRSLDEIRKLAEEVDRRSKKVLDEIRRLVDEVRERLR

SEQ ID NO: 18291 - protein, 59 aa, Artificial Sequence
  Synthetic
DAEDILREIKKLADDLKREADKSLKEIEELARRLEEEAERSLREIEELARRLKKRADEK

SEQ ID NO: 18292 - protein, 59 aa, Artificial Sequence
  Synthetic
REALKRAAERARELADRARKLSEDTLRKAKKLADDARKLSRETLEKARELAERAERRLT

SEQ ID NO: 18293 - protein, 59 aa, Artificial Sequence
  Synthetic
DEAEEVRERVKKLIEESKRLIEEVRRRVRTISERSAELIEEVERRVDKMARDVERLLKD

SEQ ID NO: 18294 - protein, 56 aa, Artificial Sequence
  Synthetic
DEVLRRLEKLVRDSNDEIRRVLKELKEVVKKNRDEIERVLKEARKKVEDLLREIER

SEQ ID NO: 18295 - protein, 59 aa, Artificial Sequence
  Synthetic
SEVERVRRENEETIRRIDEVIKKIEEDNKRTIDEIRDVIRRVKETVEKTNREIEKVRRD

SEQ ID NO: 18296 - protein, 56 aa, Artificial Sequence
  Synthetic
DEALRELRKSNEDLERRIRKVLEDLKRSNDELLEEIDRVLKRLHKSDEDVRKRVTD

SEQ ID NO: 18297 - protein, 59 aa, Artificial Sequence
  Synthetic
RELEEAEKTVEELIRRIKEIIDEVLKRDRDVSERSKELIDKVKREAEKIVEEIERLLKN

SEQ ID NO: 18298 - protein, 56 aa, Artificial Sequence
  Synthetic
SEVLRKLDKKVKDLKREIDDVVRESKELIKRNRRRVEEVAKELERLIKEVKDRIDT

SEQ ID NO: 18299 - protein, 59 aa, Artificial Sequence
  Synthetic
DELERVREEVRRLIKEIEEIIERVERRDEEVSRKSEDLIRRVLKRDEELAKEIEDLKRN

SEQ ID NO: 18300 - protein, 56 aa, Artificial Sequence
  Synthetic
SRVLEELKRLVEELEREIRRVFEKSKKLIDDNRKKADDVVKRSEDLLREVKKEIDR

SEQ ID NO: 18301 - protein, 60 aa, Artificial Sequence
  Synthetic
SESEEVERLVEDVSRRNTKAVRDIEEHSKDVSRRNKKLVREVEEHTREVIERAKELTKRR

SEQ ID NO: 18302 - protein, 56 aa, Artificial Sequence
  Synthetic
RDVVERIRRLLRENVEENKKVLKRSDDLLKKNERENREVVKKSEKDARDLVEEIKT

SEQ ID NO: 18303 - protein, 60 aa, Artificial Sequence
  Synthetic
SEEEDVRRKVEKVSRENKDMVRRILEHSRKVSEDNRRLVKEILDRARKAIEDVKELIERL

SEQ ID NO: 18304 - protein, 56 aa, Artificial Sequence
  Synthetic
RDVVREIKELLDRNREENRKVLEDSERLVDENEKDNKRVLDELRRLLKRAEEEARR

SEQ ID NO: 18305 - protein, 60 aa, Artificial Sequence
  Synthetic
SIDKALRDLKEILDRNRKHSEDLLREAEELVERSNDHSRRVLEEIRKLLRELEEEIRKRV

SEQ ID NO: 18306 - protein, 59 aa, Artificial Sequence
  Synthetic
EKLVREVEKTVEDLSRENKKLNEDVKRTVDELIKKSEKLNEDAKRTIDELLKRVKERIE

SEQ ID NO: 18307 - protein, 60 aa, Artificial Sequence
  Synthetic
SVEDLLRKLKTIVDENRERVKKSLEELRRILDENRRRVERSLRELRESNERLRKEIEDTV

SEQ ID NO: 18308 - protein, 59 aa, Artificial Sequence
  Synthetic
EEVLKKVEETVKRLSDENRELNKRIKEEVDEMSKRNKELNKRIKEENDKLIKEVKDEIR

SEQ ID NO: 18309 - protein, 60 aa, Artificial Sequence
  Synthetic
SVEDVLRELKELIDRNREEAKKTEKELRELIKRNDDEAEKVAKESKKLTEDLEKEAREKV

SEQ ID NO: 18310 - protein, 59 aa, Artificial Sequence
  Synthetic
EKVLREAKERAKEISKRNKDVNEEARKRIKEISDKDKRILDEVRRESKEIEKRLKEALK

SEQ ID NO: 18311 - protein, 60 aa, Artificial Sequence
  Synthetic
DDEERVREVVKRVKEDNERVDREIREIVKRLLEHDRELLEEIKKEVDRVAEELRKLKEDG

SEQ ID NO: 18312 - protein, 56 aa, Artificial Sequence
  Synthetic
SEVLERLRKTLEELEKRNEELLEEARRLLEESREEVRELLERAKKILEDLEREIRR

SEQ ID NO: 18313 - protein, 60 aa, Artificial Sequence
  Synthetic
SREERVREVVKRMLERDEELLRRIREEVERALRRNDEVLREIERVVEEMEERVERLKREG

SEQ ID NO: 18314 - protein, 56 aa, Artificial Sequence
  Synthetic
DEVLEDLRRLLEESVRRVEDLLKKLTDIVRESRKRVRDILRKAKRIVDKLREEIKK

SEQ ID NO: 18315 - protein, 60 aa, Artificial Sequence
  Synthetic
DVEREAKRLLEEVAEHVRRSIKELRKLLEDVARHVEKTLRELEKLTDDVRKRVEKLKRDV

SEQ ID NO: 18316 - protein, 56 aa, Artificial Sequence
  Synthetic
RKVVEDIREKVKDLKRKHDTVLEEIKKEVRRLEKEHKEVLDKSNEDARKLEEDLRR

SEQ ID NO: 18317 - protein, 59 aa, Artificial Sequence
  Synthetic
SEREEAKKLLRENEEDNRRVDREVEKLTEENERINRRVNEEVRKLTEDIKRKVESVKRL

SEQ ID NO: 18318 - protein, 56 aa, Artificial Sequence
  Synthetic
RDIVEDIRRKADRLRERNEETLKRDEDKLKKLEESNRKVLKEDEDELRRLADKLRK

SEQ ID NO: 18319 - protein, 60 aa, Artificial Sequence
  Synthetic
SEAEEAAKRSRDTAKRAEEIAREAAERLKKNAEDAERIAREAKKTSKKTAKEAEDAARSN

SEQ ID NO: 18320 - protein, 55 aa, Artificial Sequence
  Synthetic
DELRELAKRTEDKARKLADELRKLADETEKKARKLAEEVKKLADDTRRKAEEARR

SEQ ID NO: 18321 - protein, 59 aa, Artificial Sequence
  Synthetic
DEVEKAKEESRRTLKKIEDRVRKVAEDLKKNLEDIERRVREVLEELRRLLEEIEEVVRR

SEQ ID NO: 18322 - protein, 55 aa, Artificial Sequence
  Synthetic
EELERLVEKTEDKIRKLLEEIKELLKETEKKIRKLLKRIEELMKEIEDKIDEDKK

SEQ ID NO: 18323 - protein, 59 aa, Artificial Sequence
  Synthetic
DEVERVKEELKRNLKEIREDVERVKEESRDTVRKATEIVKRVLEELKKSLEEIKKLVDD

SEQ ID NO: 18324 - protein, 55 aa, Artificial Sequence
  Synthetic
EELRDTLRKSAEDIERLLREIEDLVRKTTEDAKRLADEVRRLVKESERTIKERAD

SEQ ID NO: 18325 - protein, 59 aa, Artificial Sequence
  Synthetic
SEVEKVDRELKDNLRRIEEEVRKVDEELRRLLEEIRRTVEEFKERSKRTVEEIEKVARE

SEQ ID NO: 18326 - protein, 55 aa, Artificial Sequence
  Synthetic
EELRRTLEESERRIRKLLEDLKRLLEEIEKDIRRLEEEVDKLVRDTEKRIDDLRR

SEQ ID NO: 18327 - protein, 60 aa, Artificial Sequence
  Synthetic
SLEDELRRRITEAEKRIRDLLRRVRELVERSKKTIKDLLRKLEETARETKDEIRKLEEEV

SEQ ID NO: 18328 - protein, 59 aa, Artificial Sequence
  Synthetic
EEKVRRVEREIKEILKKIEEDVTRLLEENKKILKEVEDLVRELEKEDRDVLKKVRDDVK

SEQ ID NO: 18329 - protein, 60 aa, Artificial Sequence
  Synthetic
DLRERLEEEIERARRDIEDLLRKAEELAKRSKDDIKRLMDEVRRLVEKTRRDIEKLLREV

SEQ ID NO: 18330 - protein, 59 aa, Artificial Sequence
  Synthetic
EEKVRKVEEEIRRVLEKIRRDARKLLEENKRITDEVRKRVKELLEENRKVLKRIKDEVD

SEQ ID NO: 18331 - protein, 60 aa, Artificial Sequence
  Synthetic
KLREELEKLAEEAKKRIEDLAREAREAAKRASESNKDLARRLRELAKRTEDEIKRLLDDA

SEQ ID NO: 18332 - protein, 59 aa, Artificial Sequence
  Synthetic
EEAARKAAEEIKKILEEAERLAREALKELERSNEESERLARRAAEEDKRVADEARERAR

SEQ ID NO: 18333 - protein, 60 aa, Artificial Sequence
  Synthetic
SLREELRKKIEEAKKRIEKLMDDVRKEAEKAKRSNEELLRRLRKLAKETKRRIEELLERV

SEQ ID NO: 18334 - protein, 59 aa, Artificial Sequence
  Synthetic
EEKVRRLLKEIEEILRRIEDKVRKLLKELRDSNRDSKRLVDELMRRDKEVLRRIEEEVK

SEQ ID NO: 18335 - protein, 60 aa, Artificial Sequence
  Synthetic
DLERELEELIKKAEKKIRDLRKEVEDVVRDASRSNKELLREAEKLAEETRKRIDDLRKEV

SEQ ID NO: 18336 - protein, 59 aa, Artificial Sequence
  Synthetic
EEKVRELEKRIRDVLRRIEEEVRRLLKRLKDSNDDSRRRLEELLRRDKKVLEDIERETK

SEQ ID NO: 18337 - protein, 60 aa, Artificial Sequence
  Synthetic
SLREELERLIKEAEEKIRRLLKEVKDLVRELSRTNKKLLKEVRDLAKRTKERIKRLLDEL

SEQ ID NO: 18338 - protein, 59 aa, Artificial Sequence
  Synthetic
EDKVRKLLEDIERLLREIERLVRELLEELKDSNRRSEELVRRLLKEDKDVLEKAERDVR

SEQ ID NO: 18339 - protein, 57 aa, Artificial Sequence
  Synthetic
DEEEELRRLVRRLMEEVKRLLEENKKLADELRKTVKKLLEDNEDLARRLREEVERKV

SEQ ID NO: 18340 - protein, 56 aa, Artificial Sequence
  Synthetic
VEEVKKELEELLREVEELSRRSLKELKELLERVKKRSEESLKELEDLLREAERKSR

SEQ ID NO: 18341 - protein, 57 aa, Artificial Sequence
  Synthetic
SEKEELKKEVDRLAEEVERLLRENEKRARDLERKIRKLLEENRRAADEVRKEVDRTV

SEQ ID NO: 18342 - protein, 56 aa, Artificial Sequence
  Synthetic
VEEVKKRLEDLLEEVKELSKRSEDTLRKLAEDVKRLAEDSNKKLEDLLEEAKERAR

SEQ ID NO: 18343 - protein, 57 aa, Artificial Sequence
  Synthetic
SEKEELRDLVRRAKEDVDRLRRENEELNRRIEEDIERLLKENEDRNREVKDDIDKRV

SEQ ID NO: 18344 - protein, 56 aa, Artificial Sequence
  Synthetic
VEEVKKELEELLRRVRKLSEDSLKHLRELLKEVRELSERSLRHLDELLRRVREKAR

SEQ ID NO: 18345 - protein, 57 aa, Artificial Sequence
  Synthetic
KDEEDAERRARESDKSIEELRERNEREAKRLKEEVEKLLEENEKKVDELRKRVEKTV

SEQ ID NO: 18346 - protein, 56 aa, Artificial Sequence
  Synthetic
MEEVKEELDRLNKEAEELSRRSLRKLEELLREARRLSRESKERLKKLLEDARRKSN

SEQ ID NO: 18347 - protein, 57 aa, Artificial Sequence
  Synthetic
SDEERAREEARRSKESIERLLEENRRLAKELKKEIRRLLKENEDLVRKLKEDVDREV

SEQ ID NO: 18348 - protein, 56 aa, Artificial Sequence
  Synthetic
IEEVLEELDRLNKEVEELSRRSLKRLEELLEEVRKLSEDSLRKLKELLDRVREKSR

SEQ ID NO: 18349 - protein, 60 aa, Artificial Sequence
  Synthetic
DERERLRKALEEVRRTVEKLVRENEELLKKVEERVRRLNDEDRRLVEEIKRRADELRKRG

SEQ ID NO: 18350 - protein, 59 aa, Artificial Sequence
  Synthetic
DEVIRRVEDELRKVLEDIKRLSDKNKRDLEEALRDIERLVKENNKRLKEALDDLERAAT

SEQ ID NO: 18351 - protein, 59 aa, Artificial Sequence
  Synthetic
SEREDLKRELDEVRKDVARLNEEDRRLLEDARRDLEKLVRDNEELVERVKKTLKELEDR

SEQ ID NO: 18352 - protein, 59 aa, Artificial Sequence
  Synthetic
DEVIRRVRDRLRRVDEELKELVKRNNERLREVLERIRKLSRDNSERLKAALEKIKEEVR

SEQ ID NO: 18353 - protein, 60 aa, Artificial Sequence
  Synthetic
SLKEKIEKLLEESRKDIEELNERDKKRVKESEDTVRRLNEEDEELVKRVREELEKLRKEG

SEQ ID NO: 18354 - protein, 59 aa, Artificial Sequence
  Synthetic
EEVIKEVEKRLRDVTKTSREKVRENNRRLEEMTEDTKRLVEENNKDLDKALKDIRKKAE

SEQ ID NO: 18355 - protein, 60 aa, Artificial Sequence
  Synthetic
KEREELEKLLEEVERDVARLNKEDKDLVDEIRRRVDELVKRDKELLDRVRDRLRELSERG

SEQ ID NO: 18356 - protein, 59 aa, Artificial Sequence
  Synthetic
SRVIEKVKRDLRRVLEELRRLAEENNRRLDKALKELEDLVRKNNKKVEDALRKIEEEVR

SEQ ID NO: 18357 - protein, 60 aa, Artificial Sequence
  Synthetic
ELAEDLRRLLKEVEDRSRDLLRKNRKLLEEVRERTERLIKELEDLLEEITRRVKDLIRKI

SEQ ID NO: 18358 - protein, 59 aa, Artificial Sequence
  Synthetic
EELVRRVKEEIKRLMEEDKKLNKKSVEEIRELLKRDRDLIEEVKKEAERLLKEIEDEVR

SEQ ID NO: 18359 - protein, 60 aa, Artificial Sequence
  Synthetic
DLERELEKLLDEVRRRVEELNKRNEDLARKVAEDTKELLKELRELLEEVKRRVRDLIRKI

SEQ ID NO: 18360 - protein, 59 aa, Artificial Sequence
  Synthetic
REVAERVKEEIRRLLKEIEELNKRSEERIKKLLEDDRRLIERVKERIEDLLRRIEERTR

SEQ ID NO: 18361 - protein, 57 aa, Artificial Sequence
  Synthetic
DEVDELLKRLEDSSRKAEEDVKRMLERLEDSTRDAARRVKEMIKRNEEVSDEAEKRI

SEQ ID NO: 18362 - protein, 59 aa, Artificial Sequence
  Synthetic
DKVVKEIDDLLRESERRNRELLREIEELLKESERINRELLKEVDKVLRDSEERVERRRE

SEQ ID NO: 18363 - protein, 60 aa, Artificial Sequence
  Synthetic
DLERRLDKILRDIEEAARDNIRRNEELLKRSEENVRRNLEENKKKLEEIKREVEELERRV

SEQ ID NO: 18364 - protein, 59 aa, Artificial Sequence
  Synthetic
EELAKRAEERLRELLKELHEISKKMLREIKRVNDEINKVSKESLDELDELVKEIKERTR

SEQ ID NO: 18365 - protein, 60 aa, Artificial Sequence
  Synthetic
SLEEELRKMLEKVERDVRRNIERNKRLLDRSRENVKENIKKNRELLKEIEKDVRKLETDV

SEQ ID NO: 18366 - protein, 59 aa, Artificial Sequence
  Synthetic
EKLAEDAKRRLEELVREIHKISEDALEEIKRVNKEINDVSKEMLDRLRELLKEIKERTR

SEQ ID NO: 18367 - protein, 60 aa, Artificial Sequence
  Synthetic
SLEEELEKLLDEVRKEVKKNIDENKRLLDKSREEVRKNIKTNEDLLRRIEEKVRRLLEEV

SEQ ID NO: 18368 - protein, 59 aa, Artificial Sequence
  Synthetic
EELAERAKRELKKLEEEIHRISREALERSKKTVEELHEISKRMLDELKRVDKRLEDETR

SEQ ID NO: 18369 - protein, 60 aa, Artificial Sequence
  Synthetic
DQREDLDRRLREIEERVEENLRTNEELLKEVEKNAKENIDRNRKTLEDIKRRVDDLRRRV

SEQ ID NO: 18370 - protein, 59 aa, Artificial Sequence
  Synthetic
DELVERVKDELRKLVKEIHDVSKKALEDLERLLRELNEISERALRTLEKLLRKLEEDTR

SEQ ID NO: 18371 - protein, 60 aa, Artificial Sequence
  Synthetic
SLEETLKRILDKVREEAKRNIKENEDLMRESRRNVEENIRRNEKTLEDIEEEVRRLREEV

SEQ ID NO: 18372 - protein, 59 aa, Artificial Sequence
  Synthetic
EELAKRVKEELDKIVRRVHEISRRALEESRKTVEELNRESEKVLRELERLLRRLEEEVR

SEQ ID NO: 18373 - protein, 60 aa, Artificial Sequence
  Synthetic
SDEDDLRRILEEIRRNVERNIRENERLLDEIKKRVDENIKTNKKTLEDIREEVRKLEEEV

SEQ ID NO: 18374 - protein, 59 aa, Artificial Sequence
  Synthetic
RELVKRVEDTLRDLLRKLNEISKRALEELKRAVERIHRISRDALRELDRLRKELEERTR

SEQ ID NO: 18375 - protein, 60 aa, Artificial Sequence
  Synthetic
DDEERLDKILRDIEENARRNIERNRTLLERSRENVKRNIDENRRKLEEIRRDVEDLKRKV

SEQ ID NO: 18376 - protein, 59 aa, Artificial Sequence
  Synthetic
KELVKRAEDELRRLLKELNEISERMLRRSEETVRRLNEVSERALRELDRLRKKIERRTR

SEQ ID NO: 18377 - protein, 60 aa, Artificial Sequence
  Synthetic
SLEETIRRILEESERNVKRNIDENRKLLKEIRDNAKRNIDENRRLLEEIERTVRDLERRV

SEQ ID NO: 18378 - protein, 59 aa, Artificial Sequence
  Synthetic
EKLAEDVLRELDKANKDINEISKKMLEDLKKAVEDVNRVSKEMLERLKRLREEIEKRTR

SEQ ID NO: 18379 - protein, 60 aa, Artificial Sequence
  Synthetic
KDEERLDEILDRSRRNAETNIKRNKDLLDESRENVKENIKKNEDLARRIRERVEDLERKV

SEQ ID NO: 18380 - protein, 59 aa, Artificial Sequence
  Synthetic
EELVKRVEDELRRLNEEVNKISEEMLKRSKDTVRELNKVSEDALRKLDELRERIERRTT

SEQ ID NO: 18381 - protein, 60 aa, Artificial Sequence
  Synthetic
SLEEDLRRILKEIRDNVRENIRTNEELLKRSRENVKENIERNKKLLREIEEEVRRLEREV

SEQ ID NO: 18382 - protein, 59 aa, Artificial Sequence
  Synthetic
EKLAKEVKDRLRDLLRKLNKISEDALRELKRLNDEINRISEEALERLKKLLEDLERRVR

SEQ ID NO: 18383 - protein, 60 aa, Artificial Sequence
  Synthetic
SLEEKLRKILEESRENVERNIRRNEDILRKSRRNVEENIKTLEKILEDIKRTVDKLKKDV

SEQ ID NO: 18384 - protein, 59 aa, Artificial Sequence
  Synthetic
EELARKVERELREMNKELNRISEEALKRIEEVNRDINRVSKEVIEELERLVEKIREDVR

SEQ ID NO: 18385 - protein, 60 aa, Artificial Sequence
  Synthetic
DLERELRKAAKESRENAEKNKEDNKEAAKRSKENAEKNIRDNEETARKIEEDARKLEKDA

SEQ ID NO: 18386 - protein, 59 aa, Artificial Sequence
  Synthetic
EDLARKALRDLREANKRANEISKKALDEIRKANEDANRASKKANDDLRRLAEKAKRDAE

SEQ ID NO: 18387 - protein, 60 aa, Artificial Sequence
  Synthetic
DLERELRELLERVRKDVRDNLETNKKLLEESRKNAEDNLRENDRLLKELEKRVKDLLDEL

SEQ ID NO: 18388 - protein, 59 aa, Artificial Sequence
  Synthetic
EEVVKRVLDDIKRIVDEINRISKEMLDKLKRINDEANKISKRMLDELRRIAEEIEREVR

SEQ ID NO: 18389 - protein, 60 aa, Artificial Sequence
  Synthetic
DLEERIKKLLEESRKNVEDNEKKNKDSLRRSREEVKRLSDENEKLLKRIRERAEKLKTDL

SEQ ID NO: 18390 - protein, 59 aa, Artificial Sequence
  Synthetic
KRVVETVLRELERINEEINDISRKMLKENEKILRDIKKINEDMLKRLKEALERVDREVN

SEQ ID NO: 18391 - protein, 60 aa, Artificial Sequence
  Synthetic
SLEEEIRDILRRAEERVKELTKENERSLRESKKRVEDLSRENEKTLEEIKRDVDRLLKEL

SEQ ID NO: 18392 - protein, 59 aa, Artificial Sequence
  Synthetic
EDVVREMLKDLERIVREISEDNARTLEENERILREIEEENKKTLERLREILKRIREEVT

SEQ ID NO: 18393 - protein, 60 aa, Artificial Sequence
  Synthetic
SLEEEIRKILKRIREEVKRLTEENDKTLKDSERNVRENLTEIERILREAADDVRRLEEEL

SEQ ID NO: 18394 - protein, 59 aa, Artificial Sequence
  Synthetic
EEVVERVLRELERLLEEIRDRNKKTLDDLRRINEEVNRISKDALEELRRLLRELRELVK

SEQ ID NO: 18395 - protein, 60 aa, Artificial Sequence
  Synthetic
SLEDEIRKILDELRKNVRENLEDNKRVLREAEEEAKKLSEDNRRLLKELKERVKELKDRL

SEQ ID NO: 18396 - protein, 59 aa, Artificial Sequence
  Synthetic
EEVVRRALEEIERINRDINRRSKEVLDELREIVREAKEDNERTLRKLKKILEEIEEKVR

SEQ ID NO: 18397 - protein, 60 aa, Artificial Sequence
  Synthetic
RLKEELERILREAEKNVRENLRRNRESLKESKETVDRLSEENKKTLEEVRTTVEELLKEL

SEQ ID NO: 18398 - protein, 59 aa, Artificial Sequence
  Synthetic
EEVVRDALRKLEEINRRINEISERMLKENKRLLEEIKRINKETLDRLKELLEEIKEDVR

SEQ ID NO: 18399 - protein, 59 aa, Artificial Sequence
  Synthetic
SDVERVEKELKKTNDELRKIVDEARKLLEKTNKEIRDINRTMMEELRRTNEDLKRVVER

SEQ ID NO: 18400 - protein, 59 aa, Artificial Sequence
  Synthetic
RRVIERIREIARKNEEDVKKLLKELKDLLEKNKRDVEKASEENKKLLEDNERDVRREST

SEQ ID NO: 18401 - protein, 59 aa, Artificial Sequence
  Synthetic
KEAEEAAKLLEDTNRRLKEIAEEAEELLRRTNEKAKKINDESREKIKDAARRAEDAARR

SEQ ID NO: 18402 - protein, 59 aa, Artificial Sequence
  Synthetic
EKAIREIKELAKKNKEDAERALERIKRLADKNREDAKRADEDNERAAEEARRKAEELKR

SEQ ID NO: 18403 - protein, 59 aa, Artificial Sequence
  Synthetic
DEAEDVERKLEATNKELNEINERSRKELETSNRELNRINTESEEEIRRIEERIDRVKKR

SEQ ID NO: 18404 - protein, 59 aa, Artificial Sequence
  Synthetic
KELIERIKRLLDKNREDVKRMNEDNKRLLKENRDDVKRMDEKNKKILDEVDEKAKEKEK

SEQ ID NO: 18405 - protein, 60 aa, Artificial Sequence
  Synthetic
SEEEELKKLLDRVRERVERSLDEIRRLAREVEEHVKKVNDDIRRLLDEIRREVEDIERRV

SEQ ID NO: 18406 - protein, 55 aa, Artificial Sequence
  Synthetic
DEVRELVRTLEERIDDSTREVKKLIEDLKRENKRILDTVRDLVRRLREKIKRIAD

SEQ ID NO: 18407 - protein, 60 aa, Artificial Sequence
  Synthetic
DEEERLAELLERVKRDVDRSLKRIRDLLKELEKHAKEVNDDIRRLLEEVERRVREMEKRV

SEQ ID NO: 18408 - protein, 55 aa, Artificial Sequence
  Synthetic
REVEELIRRMLKRIRDSTKKVEDELRRILEENRRILEEVRREIDELKKAIDEISR

SEQ ID NO: 18409 - protein, 60 aa, Artificial Sequence
  Synthetic
SEEERLEELLRRIEKHSRELIRELEKSLEDSEREVRKSLKRIEELLRRAERKVREIRKRV

SEQ ID NO: 18410 - protein, 55 aa, Artificial Sequence
  Synthetic
REVKKVLDDLLKRDRDAIDEARKLNEEMLKRIEDSSREVEKLLADMEKTIEDIEK

SEQ ID NO: 18411 - protein, 60 aa, Artificial Sequence
  Synthetic
SIDDKARKDLKRILDENRDIVRRVEELIRRSDELLKRILDDVKRRIDELRKKLEDIARKV

SEQ ID NO: 18412 - protein, 59 aa, Artificial Sequence
  Synthetic
EDVLRDIDRLLKEIKKHAEDSLRKIEKLLRESEEKVKDILRKIKKLLDEARKEVEDRRR

SEQ ID NO: 18413 - protein, 60 aa, Artificial Sequence
  Synthetic
SIAEEVEELIRRLETKNRKIVKDVEDAIRASDDKNRRVLDKVRKDVERLKRELDRIAKEV

SEQ ID NO: 18414 - protein, 59 aa, Artificial Sequence
  Synthetic
KEVLDRIKELLKKLEKHVKDSLDKIDDLLRKSEKHVRESLETIKRLLEELEREVERLAR

SEQ ID NO: 18415 - protein, 60 aa, Artificial Sequence
  Synthetic
DEKREVERLIRELIEENRDIVRRVEKLVRESNKKLDEILEEIRERLERLREKLKDIKRRV

SEQ ID NO: 18416 - protein, 59 aa, Artificial Sequence
  Synthetic
EEVLRRIRELLERVEKHVRDSLRRIDELLKRSEERVRRIIREVRERLKRLEEEVREAKR

SEQ ID NO: 18417 - protein, 60 aa, Artificial Sequence
  Synthetic
SISEDAERLVRELLRKNKEIRDRVEELVRRSNDKNRRVLEEVEKRLRDIIRKLEDIERRV

SEQ ID NO: 18418 - protein, 59 aa, Artificial Sequence
  Synthetic
EEVLRRIRDLLRRVTEHVEKSKRDIEKLLRESRDHVRRSKEKIKRLLDEARERVERSKK

SEQ ID NO: 18419 - protein, 60 aa, Artificial Sequence
  Synthetic
DEEDKLRKLLEEAREAVKRALERVDKLLRDSEREVRRILEEVKKLLDESRKAVEDIRRKA

SEQ ID NO: 18420 - protein, 56 aa, Artificial Sequence
  Synthetic
SEEAEELIRRVIRKAEKLLREVEELLRRSNDKLRKLTEKVRTDLERSKKRLEDEAR

SEQ ID NO: 18421 - protein, 60 aa, Artificial Sequence
  Synthetic
SILEKVRELLERIRDTVRKILREIEKSLEDNKRHSDEVLKEIEDLLRDLERRVKEIEERI

SEQ ID NO: 18422 - protein, 59 aa, Artificial Sequence
  Synthetic
EEILEEIERLIREVRRRLKKILDDVRELSRRANEKDRKSLEEVRKLVEDVRRELERVAT

SEQ ID NO: 18423 - protein, 60 aa, Artificial Sequence
  Synthetic
DVEEEVKKLLEDLERHSRKVLEEIKKLLKELEDHNRKTVEDIEELLRELEKEVRKLEEDV

SEQ ID NO: 18424 - protein, 59 aa, Artificial Sequence
  Synthetic
EEILEEIRRLAEELEKEDRKTLKEARDLAREVKKRNEEIKRRVEELIKKVDRELKEVAR

SEQ ID NO: 18425 - protein, 60 aa, Artificial Sequence
  Synthetic
DEDEDVRRLLRRLREKVRRVKKKIDDSLRENRKKVRKTNEEVKKLLEDNRRRIEDVKRKR

SEQ ID NO: 18426 - protein, 56 aa, Artificial Sequence
  Synthetic
SEEARKLMRELEKELKEIEDEVDKMSEEINRKNDEILRRARELIKRNNELLEEIRR

SEQ ID NO: 18427 - protein, 60 aa, Artificial Sequence
  Synthetic
SEEEEVRKLLERLERTVEKTNRDVERSLRENEKRVRETNDEVRRLLEENRRRIEDVERKL

SEQ ID NO: 18428 - protein, 56 aa, Artificial Sequence
  Synthetic
SEEAKRLIEELEKRNREVKKEVEEMSRRINKKNEEILREARKLIEENNKLLKDIER

SEQ ID NO: 18429 - protein, 60 aa, Artificial Sequence
  Synthetic
SELDEIAKAIRRLLEEVRRKNERIDEDIRRLLDELREHSEKVLREIEELLRRLEDAVRKR

SEQ ID NO: 18430 - protein, 59 aa, Artificial Sequence
  Synthetic
KDARKRAKDVLRDLEKKVEDLKRRNDKTLTDAKRELDDSRRRVKRVLDELEKVLRDLKR

SEQ ID NO: 18431 - protein, 60 aa, Artificial Sequence
  Synthetic
DEAERILEEVKKLLEEVERLNKKIDDEARRLLREVERENEEIDRDIKRLLDEVRKDVERN

SEQ ID NO: 18432 - protein, 59 aa, Artificial Sequence
  Synthetic
EEVRRRAEEVLRELEKVVEDSRRRNEKTLRDMERRIKELEDRNRDTLRKLREVVKELER

SEQ ID NO: 18433 - protein, 55 aa, Artificial Sequence
  Synthetic
SEEERVRELIERMREMLERLEESNKKVLEEIERVLEKSERDVERVIREIERTLEE

SEQ ID NO: 18434 - protein, 56 aa, Artificial Sequence
  Synthetic
TDRVIREAERVLEEVRRRNEKVNKEARDLLKEVEKHSRDVLEDIKRLLEEIRERAR

SEQ ID NO: 18435 - protein, 56 aa, Artificial Sequence
  Synthetic
SEKERIEDVIRRIEKVLKESRDEADRVKKEIEKRLRELEKRHKEVTTEVKRVAEEV

SEQ ID NO: 18436 - protein, 56 aa, Artificial Sequence
  Synthetic
SETVLREAEELLRRVKKHSKEVLDRVRELLKRVEEKSERVLRELERVLREIREKAR

SEQ ID NO: 18437 - protein, 55 aa, Artificial Sequence
  Synthetic
KDEERIEELLRRNEENLRRLEDSNRKVLRENEEILKELKRRHEKITEDLKRELEK

SEQ ID NO: 18438 - protein, 56 aa, Artificial Sequence
  Synthetic
TDTVLREATELSKEVHKENRRVNEEAKDLSRRVAEESDRILRELKKLLDEIRKRAK

SEQ ID NO: 18439 - protein, 55 aa, Artificial Sequence
  Synthetic
SDEERIRRVIEDIERKLRELEKRHKEVTRENKENAKELKERHDRVTKDIKKTLDD

SEQ ID NO: 18440 - protein, 56 aa, Artificial Sequence
  Synthetic
TDRVLEEIKKLLREVEERSDRALREAKKLSKRVHERSKEVIDRLRELLREIKREAD

SEQ ID NO: 18441 - protein, 59 aa, Artificial Sequence
  Synthetic
DSAREMERRIRELLKRVEDKSEKALRDSKKLTKEVEEESERALRRTEKLLREVAELARR

SEQ ID NO: 18442 - protein, 56 aa, Artificial Sequence
  Synthetic
EKRVRDVLREIEEVLRRLEERHERLTRDDERVLRELEDRHRKLSERVKKLLEELKK

SEQ ID NO: 18443 - protein, 59 aa, Artificial Sequence
  Synthetic
DRAEKAEREIRRLLERVKEDSERVLRESEELTRRVEEESRKILEETKKLTRTLEELSRT

SEQ ID NO: 18444 - protein, 56 aa, Artificial Sequence
  Synthetic
EERVKRVLEEIERLLRELEERHKRLTERDKEVVKRLADRHREVSEEDRRVLEELKR

SEQ ID NO: 18445 - protein, 59 aa, Artificial Sequence
  Synthetic
DEMEEVIRRIETLLKRVVDESDKVLEDIKRLLDRVVEESEKALETTRKLLEEVAELART

SEQ ID NO: 18446 - protein, 56 aa, Artificial Sequence
  Synthetic
EDEVRRVLERVKKVLDELAERHKELSKEIKRELRRLEKEHEDLSEEVKRLLRELER

SEQ ID NO: 18447 - protein, 59 aa, Artificial Sequence
  Synthetic
DEMREAEEEIKRLLDTVKTESDRVLEEARKLTRRVEEESERVLRETKKLTDELRKLSRK

SEQ ID NO: 18448 - protein, 56 aa, Artificial Sequence
  Synthetic
EERVRRVLKEIREVLDRLEKRHKKVSKDDKEVLERLEKEHKRLSREDEEVLRELER

SEQ ID NO: 18449 - protein, 59 aa, Artificial Sequence
  Synthetic
SRMEKVEREIRTLLKEVEERSRKVLDESRKLTEDVERISRDALKKIKELLEEVRDLART

SEQ ID NO: 18450 - protein, 56 aa, Artificial Sequence
  Synthetic
EKDVRRVLREIEELLKDLERKHKELTRRDEEVLKKLEDDHRRVSEEIEEVLRRLEK

SEQ ID NO: 18451 - protein, 59 aa, Artificial Sequence
  Synthetic
SRAERVKEEIKKLLEEVRKESKRVLKEVKDLTKEVDDKSKKVMRDIRELLKEVEELART

SEQ ID NO: 18452 - protein, 56 aa, Artificial Sequence
  Synthetic
AEEVKKVLREIEETLRKLEEEHRRLSDRDREKLDELAKRHKKVSRDIEEKLKELER

SEQ ID NO: 18453 - protein, 57 aa, Artificial Sequence
  Synthetic
KEVEDVLDKVKKALEEIRERNKRVNDEIRRLLDEVRRRNEDADREIEEILKRVADEV

SEQ ID NO: 18454 - protein, 59 aa, Artificial Sequence
  Synthetic
EELRERIKAVVEEVERVMDELRRSNEKVVREVEDVMRRLEERNRRTLERIEEVLERLKR

SEQ ID NO: 18455 - protein, 61 aa, Artificial Sequence
  Synthetic
EEVERLLTKVRELVRRIEEENKKANDDSRKSLKEIKDRVEKALDDSRKSLEEIEKIVRRDN

SEQ ID NO: 18456 - protein, 59 aa, Artificial Sequence
  Synthetic
EELKRRIETVIKEVRETIEELKKSNEESVRDSERTIRELEEEIKRTVRESEKEIKRLED

SEQ ID NO: 18457 - protein, 59 aa, Artificial Sequence
  Synthetic
EEVERMADEVRRLNEEVRRRNEESIEEVKRLNDEIRKTNEKSIEDVKELLKRVKEVRER

SEQ ID NO: 18458 - protein, 58 aa, Artificial Sequence
  Synthetic
DAREKMKRLVEENTKSVEELKKRNEETSRRNTKSVREVTRRNEKTSDDVRRLVREEEQ

SEQ ID NO: 18459 - protein, 59 aa, Artificial Sequence
  Synthetic
DEVEEAKEKVRRLNKELRRVVKEVEDEVRRLNEEVRREVEKVRDDVRKLRETIREVKAR

SEQ ID NO: 18460 - protein, 58 aa, Artificial Sequence
  Synthetic
SLEREIEKISRENTKSLRDLLDRLRRLVEENTKSVEELVRRLEELLERVEEEMRRLET

SEQ ID NO: 18461 - protein, 60 aa, Artificial Sequence
  Synthetic
SRVETMVKDIRRLLEEVKERVERALRDNERVLEDIRRRVDELLKTNEKINRDIERRVRRG

SEQ ID NO: 18462 - protein, 55 aa, Artificial Sequence
  Synthetic
EEIKEVLRRVEEEAERLKREIEESLKRSEDLVRKLKERIKRSLEESRKRIKKLED

SEQ ID NO: 18463 - protein, 59 aa, Artificial Sequence
  Synthetic
SEVEEAVKRIRKIVKEIEERVRRLLEENRRVIEEVERINKEMLKRNKEINKEVEELVRR

SEQ ID NO: 18464 - protein, 55 aa, Artificial Sequence
  Synthetic
KEIEDILRRAEETVEDLKRRIRRSLEDSRRVVEELAEENRKSLRESKKKVDELKK

SEQ ID NO: 18465 - protein, 59 aa, Artificial Sequence
  Synthetic
SRVEDFVRRIRDLLRKIEEIARKALKENKDVLREIKRINDEMLRRNEEILKRAEDLVRE

SEQ ID NO: 18466 - protein, 55 aa, Artificial Sequence
  Synthetic
EEIKRILEEAKKTIDELRKEIEKSLREVEKAIRELEERNRRSLERSEDLVRELKR

SEQ ID NO: 18467 - protein, 59 aa, Artificial Sequence
  Synthetic
RRVEEAVKRIKEILERVTRRVEKVLRDNKRVLDDIRRINEEMLKRNKEINRKVEELVRE

SEQ ID NO: 18468 - protein, 55 aa, Artificial Sequence
  Synthetic
EKIKEILEEVRRTIEELKERIRKSLEEVKELIKRMDEENRKSLEESDERARRAEK

SEQ ID NO: 18469 - protein, 59 aa, Artificial Sequence
  Synthetic
SELEEIRERVKRVEEELRKNLKDAERRVREAKRRSEESLKDIEKKVKEVRDELKELARR

SEQ ID NO: 18470 - protein, 58 aa, Artificial Sequence
  Synthetic
SAREDIKRLLKELEELLKRSEDEARRLLKEVRDLVDTTKKRIDKLLKEIEDLLREIER

SEQ ID NO: 18471 - protein, 60 aa, Artificial Sequence
  Synthetic
KIEEKVEKLVRELLKELETVDREVNERVKRSNEKLEKIDRDVNKLVEDSNRKLKEISDRV

SEQ ID NO: 18472 - protein, 55 aa, Artificial Sequence
  Synthetic
EKIKRLLEEVKKLVEDSERNIRELLKESRKKVEDSKRNLDRLLKESDDRVDRERR

SEQ ID NO: 18473 - protein, 60 aa, Artificial Sequence
  Synthetic
ETEKEVEELVKRVLDKDKRISDESEERIRRLMEKNKKILEDVKRLVDEVREKLEDIRRRV

SEQ ID NO: 18474 - protein, 55 aa, Artificial Sequence
  Synthetic
EKIKKLLEDVRRLIKRSKEKNDELLEELKRLSEETRETLDRLLKDLEDKIREAKK

SEQ ID NO: 18475 - protein, 59 aa, Artificial Sequence
  Synthetic
DEKEDVDRLLRELEELVERSERSIRKLLEDNRKLAEDLKRTVEKLLEDNRRKVEEVRRT

SEQ ID NO: 18476 - protein, 56 aa, Artificial Sequence
  Synthetic
SEELRKLIKRVLKKLRDLNRRVKELSRRSAEELKRLLDEVRKLSEDSLRELDKLRK

SEQ ID NO: 18477 - protein, 59 aa, Artificial Sequence
  Synthetic
DEEKRVRDLLEEVREEVERSDKSIEELLRELEKAVKDSERTIRKLLEDNERMVREVRRK

SEQ ID NO: 18478 - protein, 56 aa, Artificial Sequence
  Synthetic
SKEAEDLIREILEELKRLNEDVKRLIREVLETLKELNERVKKLVKESNDELRELAR

SEQ ID NO: 18479 - protein, 59 aa, Artificial Sequence
  Synthetic
REEEKLDKLRKDLEKRVEESKRSIDKLLEDNRRRVEESKKTIEKLLEDNKRRVDEIKKR

SEQ ID NO: 18480 - protein, 56 aa, Artificial Sequence
  Synthetic
SDEAEKLIRDVKKELDRLNEEVKKLSEDSLKELDDLNREVKELMERSNRKLDEDAK

SEQ ID NO: 18481 - protein, 59 aa, Artificial Sequence
  Synthetic
KEVEDVLREIKKLIKEIHEKSKRALDETRELLERIHRTTRRVLEEIRRLLKEVEELAKA

SEQ ID NO: 18482 - protein, 56 aa, Artificial Sequence
  Synthetic
KDRVEDLVRELERVVKEDKDRSKESEERIKKLVEDDTREAEKLIRELEKILEDTEK

SEQ ID NO: 18483 - protein, 59 aa, Artificial Sequence
  Synthetic
SEVEEVLRDIDRLAKEIHKRSRDVLRDIDRLLKEIHERSRRMLERIKRLLDEVRRLVEA

SEQ ID NO: 18484 - protein, 56 aa, Artificial Sequence
  Synthetic
RDRLRELVERLERLLETDKREIEKLIKKLEEMLEEDERRARELLEDIRRILEEIKK

SEQ ID NO: 18485 - protein, 59 aa, Artificial Sequence
  Synthetic
SEVEEVTKEIKRLVEEIHKRSREALEETRRLVETIHRDSKRVLDEIERLLEEVRKLAED

SEQ ID NO: 18486 - protein, 56 aa, Artificial Sequence
  Synthetic
EKRVRDLLEKLREDAKRDEDASRKSEEDIRKVVEEDKREAEKLLKRIEDELRKTEK

SEQ ID NO: 18487 - protein, 59 aa, Artificial Sequence
  Synthetic
SEVEKVLKDIRDLVKKIHDESKRVLDEIEELVRRINKRSRDALREIRELLRTVTELAKA

SEQ ID NO: 18488 - protein, 56 aa, Artificial Sequence
  Synthetic
KDRVRKLVEDLERMLRRDEAEAEKLIKKLRELLEKDRDDIRRLLEDIKRILDEIRK

SEQ ID NO: 18489 - protein, 59 aa, Artificial Sequence
  Synthetic
EEVERALDRARRLLERIHETSRDVLRRTEELLRRINEESRRVLKEAKELLDRVEKLVRD

SEQ ID NO: 18490 - protein, 56 aa, Artificial Sequence
  Synthetic
KDRVEKLERELEKVVREDEEESKKSIRRAEEMLRKDREDIRRLLEEIKKILEDIDK

SEQ ID NO: 18491 - protein, 59 aa, Artificial Sequence
  Synthetic
SEVEDVLRKAEELAKRIHDRSRKALKETEELLERINRDSERVLRESEKLLEDVRRLAEA

SEQ ID NO: 18492 - protein, 56 aa, Artificial Sequence
  Synthetic
EKTVRRLVDKLRRLVEEDTDESRKSEERIKKMVEDDKRESEKSLKRIKDIMKEITD

SEQ ID NO: 18493 - protein, 57 aa, Artificial Sequence
  Synthetic
SEVERVLEENERTLKRIEETAKKVLEEIEKLSKEVEDRAREVLDRVRRISEEVRRDV

SEQ ID NO: 18494 - protein, 59 aa, Artificial Sequence
  Synthetic
EEMRDRVRKLIKRNDEVLDRVRREIEKLHRRNKKILDDLRREIERLNRENKRLLDELRK

SEQ ID NO: 18495 - protein, 57 aa, Artificial Sequence
  Synthetic
SEVEEVLKRNEKTLKEIEERAREVEETVRELSERIRKRNEEVNRELEERSKRIRRDV

SEQ ID NO: 18496 - protein, 59 aa, Artificial Sequence
  Synthetic
KEARDRADELLKRNREVLERLRKRIEDLHRDNKRVLDELRRSNEETNRRNRKLLEELRK

SEQ ID NO: 18497 - protein, 57 aa, Artificial Sequence
  Synthetic
REVEEVLKENEKTLREIERRMEEVLKRVEDLSDEVRRRVDEVLRRVEETSKEIAKRV

SEQ ID NO: 18498 - protein, 59 aa, Artificial Sequence
  Synthetic
EEARKRAKDVLDRNRDVLRRLKDAIDKLNKRNKEILDRLRRKIEDLNRRNEELLRRLEK

SEQ ID NO: 18499 - protein, 57 aa, Artificial Sequence
  Synthetic
REVEEVLDKNRKTLREIRKRAKEVLDRVEELSRRVREENERVNRELRKISEEIARKV

SEQ ID NO: 18500 - protein, 59 aa, Artificial Sequence
  Synthetic
EEMKKEADKLLKENRDVLRELERRIEELNERNRRVLKELEESNRRTNEENKRLLDELRR

SEQ ID NO: 18501 - protein, 57 aa, Artificial Sequence
  Synthetic
DEVETVLDENRRTLKRIRERVDKVLKDVEKLSREVEDEIRRVLEEVEKELKDIERDV

SEQ ID NO: 18502 - protein, 59 aa, Artificial Sequence
  Synthetic
EDAREKAKRLLEENKRVLKELEERVKRLNDKNRRILERIKKRIEDLRRRVKELLKKLRK

SEQ ID NO: 18503 - protein, 57 aa, Artificial Sequence
  Synthetic
DEVERVLEENERTLRRVREIIREVLEEVRRLSEEVKRRIDEVLKENEDTLKKIKDEV

SEQ ID NO: 18504 - protein, 59 aa, Artificial Sequence
  Synthetic
KKARDRVREVEKRNRDVLEEVKDEIRKVNKDNRDILRRIKKDVEELLKRNEKVLRETEK

SEQ ID NO: 18505 - protein, 57 aa, Artificial Sequence
  Synthetic
RELEELLKRNERTLRELAKRVKRLLEENKETVRRIEERLRRVLTEVEKISRDIRDRV

SEQ ID NO: 18506 - protein, 59 aa, Artificial Sequence
  Synthetic
EEVRERVKKVEDENRKLLERAEREIKKVAEENRRLMEKMKDDVRKANKRNKELLERRTK

SEQ ID NO: 18507 - protein, 57 aa, Artificial Sequence
  Synthetic
SEVEKVLRENEKTLREIEREIDRVLRDNERTLKEVRERNEEVNRRVEEDSKRVKDEV

SEQ ID NO: 18508 - protein, 59 aa, Artificial Sequence
  Synthetic
EKARERIKRILDENRKVLREIERKIREVLERNKKVLEEVRKSNEETNDRNRKLLEELRR

SEQ ID NO: 18509 - protein, 60 aa, Artificial Sequence
  Synthetic
SVDERVEDLRRDVERVLRELRKSNEESIRRSEEIVTRLEEELKRNSKEVEEVLKRLEDEL

SEQ ID NO: 18510 - protein, 59 aa, Artificial Sequence
  Synthetic
SKDLEKALRDVEKLIREIRERNKEMLRRSEEILKEIEKRARDMSRESKRLIEDIERRTK

SEQ ID NO: 18511 - protein, 60 aa, Artificial Sequence
  Synthetic
SVEEKVDRLKRRVEEVLKELKKSNEDNTREVREALKRLKKAIEESIDRSRKILEDLRRKL

SEQ ID NO: 18512 - protein, 59 aa, Artificial Sequence
  Synthetic
DEDLERALKEVEELIRRIREENKEMSERSKKIIRKIEKDVKKALDDSERVLREIAERTK

SEQ ID NO: 18513 - protein, 60 aa, Artificial Sequence
  Synthetic
DVEKKVKELLDEVRDALRRLRKSNKDNTDEVDRALRELEETNKKSIEDSRRIVEDLKRKL

SEQ ID NO: 18514 - protein, 59 aa, Artificial Sequence
  Synthetic
DREADKVLKRVKEEIERIERENRRMSEKSERLIREIRKRNKEMLDRSKKLLEDIKRRVT

SEQ ID NO: 18515 - protein, 60 aa, Artificial Sequence
  Synthetic
KEVEEILTESEDMNRKIDKLVKEILDESEEMNRRIRELVKRIVEELRELLREIRRLAEER

SEQ ID NO: 18516 - protein, 59 aa, Artificial Sequence
  Synthetic
EEVRDRLRRSHEKNKEVLDRIRKRVKESHEKNEKSLREIEETVKKLERDVERLLREIKR

SEQ ID NO: 18517 - protein, 60 aa, Artificial Sequence
  Synthetic
EEVERILKESRDANERIKKLVEDILRRSKELNERIRDEVRKILAKSEEVNRRIRRLAKER

SEQ ID NO: 18518 - protein, 59 aa, Artificial Sequence
  Synthetic
EEVKEKAKESHKENKKVLDRIKRELEKSHEENKKSLDEIRDRVRRSHEKNRKVLEEIRK

SEQ ID NO: 18519 - protein, 60 aa, Artificial Sequence
  Synthetic
EEVERILKESEDMNRRIRDLVRRIAEESDKVNREIRKLVDEIRRKLDRVLREIEDLIRKR

SEQ ID NO: 18520 - protein, 59 aa, Artificial Sequence
  Synthetic
EEVKKRAEKSHRENEKSLREIRKELEELHRKNKKSLEEIRKTLRKLEEKVRKLLEDLRR

SEQ ID NO: 18521 - protein, 60 aa, Artificial Sequence
  Synthetic
SRVEEILRESKRMNDEIREKVKKILKTSRDMNKRIEDRVREILKKSEDLNRKIRKLIDDR

SEQ ID NO: 18522 - protein, 59 aa, Artificial Sequence
  Synthetic
EEAKRELEKSHKTNEKVLRDIERRVEDSNRENEDSLRKIERAVTESHRRNEEVLERLER

SEQ ID NO: 18523 - protein, 60 aa, Artificial Sequence
  Synthetic
EEVERILEESKRLNDEIRRKVDEILRKSEEINERVRRLVEKIRTDLERVLEEIRDLADKR

SEQ ID NO: 18524 - protein, 59 aa, Artificial Sequence
  Synthetic
EEVKRRLEESHKDNDRVLKEIERRVRESLRRNRESLRRIDEKVKELERRVEKLLREIKK

SEQ ID NO: 18525 - protein, 60 aa, Artificial Sequence
  Synthetic
EEVERILDESKKMNDDIRRKVKEILDESEKLNEDIRRLVKEILEKSKRVNDRIRKLAKDR

SEQ ID NO: 18526 - protein, 59 aa, Artificial Sequence
  Synthetic
DEVRRRAEKSVRENDKSLKEIEDEVRRSVEKNEESLKRIEDEVRKSHEKNKKVLDEIKK

SEQ ID NO: 18527 - protein, 61 aa, Artificial Sequence
  Synthetic
SKAEEVLKEIRERIERIRKRAEDVLRHDEESLKRAEEVNRKMEKESRRINEEIRDRVRKEG

SEQ ID NO: 18528 - protein, 56 aa, Artificial Sequence
  Synthetic
EKDVRKVEDDIRRVIKKLKEELDRSADKSRDVVRRLRDSNKKLNDKNRRDIEEIKK

SEQ ID NO: 18529 - protein, 61 aa, Artificial Sequence
  Synthetic
DSEEEVRERIRKIIEDVKRIIEEVLRRDDKILKEIEKRNRDMLKRSKEINKEARDRVREAG

SEQ ID NO: 18530 - protein, 56 aa, Artificial Sequence
  Synthetic
DRSVRELERRIKEVIDELRELVERSKRKVDKLLKDLTRSNEKVNRENREDLERLEK

SEQ ID NO: 18531 - protein, 59 aa, Artificial Sequence
  Synthetic
DDERRAKKAAEDAAKRLKEIAEKAHRISEKALEELKRINDDANKISEDALRRLEKLKKE

SEQ ID NO: 18532 - protein, 56 aa, Artificial Sequence
  Synthetic
SEEAKELAKKIKEIADEARKRAEDNARTNKEAAERSKENADRNAEENKKAAEKAKR

SEQ ID NO: 18533 - protein, 59 aa, Artificial Sequence
  Synthetic
KDEDEVRRRVEELLKRNKELVEEIHKLSEDALRDLERINEEVNRISDEMRRRLDKLKKD

SEQ ID NO: 18534 - protein, 56 aa, Artificial Sequence
  Synthetic
SEEAKKLKERVDRSLKESEKEVRENLERNRKLLDESRRNAEENLRENKRVLDELRR

SEQ ID NO: 18535 - protein, 59 aa, Artificial Sequence
  Synthetic
SEEDEVRERVKRVLDELRKINEDLNRISREMLERNKDILRRIHEISKRALDKLKKLKED

SEQ ID NO: 18536 - protein, 56 aa, Artificial Sequence
  Synthetic
SEEVRKLLEEVKDSLRKSEENARRNLDENRRSLKKSEDEVRRNLEENEDTLRKLEK

SEQ ID NO: 18537 - protein, 59 aa, Artificial Sequence
  Synthetic
DEMDEVRRTIKKLDKDSRDKVRTVEEKIRRLDEESRRENEEIVRKIEELLEEIERRVRS

SEQ ID NO: 18538 - protein, 56 aa, Artificial Sequence
  Synthetic
EKEVKKIKEESDESLKEIEKLLREIEEESKRSLREMEKTLEDIERRVRRVLEEIKR

SEQ ID NO: 18539 - protein, 60 aa, Artificial Sequence
  Synthetic
SIEELAKRNEEENEKAAEDVERLAEEVKERAERVARESEKLAREAEKEAERVAREIRRDR

SEQ ID NO: 18540 - protein, 59 aa, Artificial Sequence
  Synthetic
EEAAKRASEENRKAVRDAREKARRAAEEAKKLLDEARKHSEEAAKRAKELLEEAKKRAD

SEQ ID NO: 18541 - protein, 60 aa, Artificial Sequence
  Synthetic
KIEELMKRNEKENREVLERVKELADRNRRENEEVVKKSKKELDDLKRKIEEVLERIKRER

SEQ ID NO: 18542 - protein, 59 aa, Artificial Sequence
  Synthetic
EEVVEKVSRENKKLVADIEDEVRRASTRNKKLVKDIEKHSEDVVRELEKLLKDIKDKVD

SEQ ID NO: 18543 - protein, 60 aa, Artificial Sequence
  Synthetic
SIEDEARRNEKRNREVLKRSKDLLDEIARKIEEVEKRIRDLVKRVKEEIDEVLRRIKRER

SEQ ID NO: 18544 - protein, 59 aa, Artificial Sequence
  Synthetic
DELLRRVSKENEDLVREIEDHTRRVLETIERKLRRVEEKVETVVREIKRRLEDIERRVK

SEQ ID NO: 18545 - protein, 59 aa, Artificial Sequence
  Synthetic
EEVDRVIERIKRLLEEVERKIRRASEKNRRLIEKSRKELEKVSKENKDLIDRVRELRDA

SEQ ID NO: 18546 - protein, 55 aa, Artificial Sequence
  Synthetic
EKVKTVEKEIREVIERADEIIERNERENKKSVEEIEEILERNKRRNEEALREVDK

SEQ ID NO: 18547 - protein, 57 aa, Artificial Sequence
  Synthetic
DELDRAIEEVKRLLDEIRRRLEKVVREVRKLNEEIREDLRRVVEEVRRTNKEIRDRV

SEQ ID NO: 18548 - protein, 56 aa, Artificial Sequence
  Synthetic
SDKVRRLEREVEELLKTVEELIRRLEEHTRRVLKEVDEEIKRLKEHTEKVLRDVEK

SEQ ID NO: 18549 - protein, 59 aa, Artificial Sequence
  Synthetic
SAEELVKELERRIEELLKELEEIVRRNRKHSEDVLRKIKELVRDVLRRVKEALKDLTKK

SEQ ID NO: 18550 - protein, 59 aa, Artificial Sequence
  Synthetic
EDVVRKLIKEIDDRLKEVKKEVEKLSDENRRLNEDVERRIKELLDDIERLLKEIRDTVT

SEQ ID NO: 18551 - protein, 59 aa, Artificial Sequence
  Synthetic
DVEDIVRRIRERVKEALERLRKTNDDNRKHSEEVLRKLAESDKRTMERIERVLEELRRR

SEQ ID NO: 18552 - protein, 59 aa, Artificial Sequence
  Synthetic
KEVVREMKRKIEELLKRIEDENKRLSDENRELNKRVEEDNRRLNKEIEDELRKVEEDVK

SEQ ID NO: 18553 - protein, 59 aa, Artificial Sequence
  Synthetic
DLEELVKELEKRIEDVLRTLRKTNKDNEKAVEESLRKLEDELRKLKEKIDRLLDKLTKE

SEQ ID NO: 18554 - protein, 59 aa, Artificial Sequence
  Synthetic
EEVVRRIIEDIRRLLEEVKKVNEDLSEENERLNRDAERRVREAIKEVEDLLDEIEKTVR

SEQ ID NO: 18555 - protein, 59 aa, Artificial Sequence
  Synthetic
SVEDELRKLEEKIRRLLEELRRTNDENRRHSEKVLEELRRELEKLKRRIEELLRKLREE

SEQ ID NO: 18556 - protein, 59 aa, Artificial Sequence
  Synthetic
EEVVERLIRDVERKLREVKKENDRASKENEDLNREVKRRAEKLLRDVERLLREVEKTVK

SEQ ID NO: 18557 - protein, 59 aa, Artificial Sequence
  Synthetic
SAEDRLRELEERIRRALKELEDTNRRNEEHSKKLLEELARSDRETEEEIKEALKRLTER

SEQ ID NO: 18558 - protein, 59 aa, Artificial Sequence
  Synthetic
EEVVDRLIREVEERLRDVRRLNEELSKRNKELNDRVREVNEELNRRIKKRLEEIKRRVE

SEQ ID NO: 18559 - protein, 59 aa, Artificial Sequence
  Synthetic
SLEDLVRTIREEIERLMKEAEDTNRRNKEESEESLRRLKKLVEDIDREVKEVLDRAEKN

SEQ ID NO: 18560 - protein, 59 aa, Artificial Sequence
  Synthetic
EKVVEELIRRIKDELKKIRERNKELSDRDKKLNEDVEREVRKLIDEIRKKLEDVERTVK

SEQ ID NO: 18561 - protein, 60 aa, Artificial Sequence
  Synthetic
REVDKVREDVKRLIKEIEDRVRKVLKEDEDLIRELRERVKKVSKENKEVVKTLRELVRDL

SEQ ID NO: 18562 - protein, 55 aa, Artificial Sequence
  Synthetic
ELVKELEKRIREVLERLRRLIERSKEEIDRVLREVEEDVRRNKEENKRLLEEAER

SEQ ID NO: 18563 - protein, 59 aa, Artificial Sequence
  Synthetic
DEKDKVRKTVEDILREIEKIVEDLVRRNERVDREIRERVRELLRRDDEILKRMEEVKRR

SEQ ID NO: 18564 - protein, 56 aa, Artificial Sequence
  Synthetic
EREVTKLKEDIDRLLEKLERDLDELRKRNDELLKELEDRVRKSKEKVEKILRDVRR

SEQ ID NO: 18565 - protein, 60 aa, Artificial Sequence
  Synthetic
SIEDKLRELKERHKELSKRIKEELERLTEEHRRVSEKIRKSLEEDKRRADKVLERIRRER

SEQ ID NO: 18566 - protein, 59 aa, Artificial Sequence
  Synthetic
EDVLRKVEEDSREVLKDSKRLLDEVATRSEEMLRRSEELLKRIHETSKKVLDEIKTKLK

SEQ ID NO: 18567 - protein, 60 aa, Artificial Sequence
  Synthetic
SIEDLARDLERRHKELSEDDKRKLDELRKRHKDVSDEARRSLERDERRVEKVEREITKRR

SEQ ID NO: 18568 - protein, 59 aa, Artificial Sequence
  Synthetic
EKVLDDVRRRSDKMLEDSRRLTREVEETSKEMLERSRRLLEEIHKESDRVLREARERDR

SEQ ID NO: 18569 - protein, 56 aa, Artificial Sequence
  Synthetic
RIEDILRRLEEHHRRLDKENKEILERLKKHHEEVLRKIKEILERLEREARDIERKI

SEQ ID NO: 18570 - protein, 59 aa, Artificial Sequence
  Synthetic
DEVVEKVVREVEDTNEKIRRRSDEVRKEVEDTNRRIDKRLKEVEEEVRRLLDEVRKESE

SEQ ID NO: 18571 - protein, 60 aa, Artificial Sequence
  Synthetic
SELEDVAKKAEDLLTKSAEILKEVVDRHRRLNERSEDEARRVEEEHRRTNKKLLDLARRG

SEQ ID NO: 18572 - protein, 56 aa, Artificial Sequence
  Synthetic
SEELRKLKKRIEDISREHERILRELREHVERVSDKHRKILKELEEDVERILREVTK

SEQ ID NO: 18573 - protein, 60 aa, Artificial Sequence
  Synthetic
SEIEKVVEDIKRLLEESKDRLRKAEEEVRDLSRRSREKLRRAEEDIKRLLDEIERMLRAG

SEQ ID NO: 18574 - protein, 56 aa, Artificial Sequence
  Synthetic
SDELRKLAEEIERVSEEHKRILDELRDHLRKNTKDVRDILRELEKEAERLLRELRR

SEQ ID NO: 18575 - protein, 60 aa, Artificial Sequence
  Synthetic
KDVEDVLKRVKDVNREVEKRLEKVIRDDEKINEEINRRLDEMAERVKRVNETVEDIARKE

SEQ ID NO: 18576 - protein, 56 aa, Artificial Sequence
  Synthetic
EKLVEELRRESDTSKKRVEKLIRELKEKNKRSEERARRIIEKLKKESKDSLKRVKD

SEQ ID NO: 18577 - protein, 56 aa, Artificial Sequence
  Synthetic
EEKEILDELEKEVRDLNRKNKEILRRLEETARDLHRRNEEILDRIRKRVEELKRRV

SEQ ID NO: 18578 - protein, 56 aa, Artificial Sequence
  Synthetic
KDTVAKEAKRLIRDLERLSREIEERVRRLIEEVKEESERIRERVTRLIKEVEDRRK

SEQ ID NO: 18579 - protein, 56 aa, Artificial Sequence
  Synthetic
DDEEILKELEERVKKLHEKNKRILEKLKREVERLNDENRRILKEVKEDVDRLLKEV

SEQ ID NO: 18580 - protein, 56 aa, Artificial Sequence
  Synthetic
SETVARRVEEMIKEVEELSKEIEERAKRLIDRLRELSKRILEELKRLLEEVREKRR

SEQ ID NO: 18581 - protein, 59 aa, Artificial Sequence
  Synthetic
REEDEVLEDARRLSEESRKKLREVERRAKELSDRSRKRLRDVKRRVDDALRKIEDLRRR

SEQ ID NO: 18582 - protein, 56 aa, Artificial Sequence
  Synthetic
SEKLRELEEEIRRNSKDVKEVMKELDKHIKRNSEEVDKVLKELEERLKRLLDRVRK

SEQ ID NO: 18583 - protein, 59 aa, Artificial Sequence
  Synthetic
SDEDRVKDKAEELSRRSREELERVKEEAKRLSDESKKRLEEVTRRIEKVLREIRELRER

SEQ ID NO: 18584 - protein, 56 aa, Artificial Sequence
  Synthetic
SEKLRRLREEIKKNSDEVKKVLRRLEENLRDNTRRVREVLERLEDEARKLLKDVKK

SEQ ID NO: 18585 - protein, 59 aa, Artificial Sequence
  Synthetic
SEVDDVLRRLKELSERSEKTLEDIRDEAEKLSKESEDLLREVLRRSEKVNEDIRRLREK

SEQ ID NO: 18586 - protein, 56 aa, Artificial Sequence
  Synthetic
SRRLEKLRREIEDNSRRVREVLKRLKENIKRNTDRVREALKRLEREHEEVLREVET

SEQ ID NO: 18587 - protein, 60 aa, Artificial Sequence
  Synthetic
SIEEAITRLRKEVEDSNKRSEDVIRELHERDKESLEEVREIIKRLKDKVRTLLEEVDKRV

SEQ ID NO: 18588 - protein, 59 aa, Artificial Sequence
  Synthetic
EEILKEVLKRLRKLLEDNERVLDEARRRVEKTNEEIKEVLKRVAEEVDRLIKEVREEVE

SEQ ID NO: 18589 - protein, 59 aa, Artificial Sequence
  Synthetic
SIDEIIEELRRRIEELRKEAEKIIRDSKKHLEDNKRDADRVIKESKEEVDKLLKEIEEA

SEQ ID NO: 18590 - protein, 59 aa, Artificial Sequence
  Synthetic
EELLEEVRKRIEDLLRELRDILRKLLERDKRLSKESERLVREMLREDRRLLDELRKEVK

SEQ ID NO: 18591 - protein, 59 aa, Artificial Sequence
  Synthetic
SIEEIIRDLRRHIKENAEEAEKVIKESEDHLRENKKRAEDVIRRLEEELRKLAERVRRA

SEQ ID NO: 18592 - protein, 59 aa, Artificial Sequence
  Synthetic
EELLKRAVDAVRKLSEDSKRLVEEALRRDEELSKRSRDLVEEVRRRAEELLRRIEETVK

SEQ ID NO: 18593 - protein, 59 aa, Artificial Sequence
  Synthetic
SSKDDVRRRMKEINERDKRLLDEVLRRLEKLIEELKRHTEEVERDADRIIEEIERMLRN

SEQ ID NO: 18594 - protein, 55 aa, Artificial Sequence
  Synthetic
ERIIKEIRDLIRENEERNKEIVRRIEELLRELEKRSRDVIKRIREKLDRLRKRVE

SEQ ID NO: 18595 - protein, 57 aa, Artificial Sequence
  Synthetic
SKVEEIERRIREEVTRSEKEDRDNVREIRKLVEELRRESKRILDESRRLVKRLIDEA

SEQ ID NO: 18596 - protein, 59 aa, Artificial Sequence
  Synthetic
DEILKRIEEEVRKILEDSRRSTEESHEKVRRIITKIRKLLEDDERRNRKVVREAEEAMR

SEQ ID NO: 18597 - protein, 57 aa, Artificial Sequence
  Synthetic
SKLEELLRRAREVARRLKEELERILKEVEDRVRKSEKEDEDNVKRITDEMRKLKERV

SEQ ID NO: 18598 - protein, 59 aa, Artificial Sequence
  Synthetic
DRVIKRIEEDVRRVIEEIKRLLRELEEEIRRILDESRESTERSHRTARKIVEEVERAAK

SEQ ID NO: 18599 - protein, 59 aa, Artificial Sequence
  Synthetic
SKMETIERRVEEAIRESEELNERDEERVKKVIDELKKLIDDIRRRLEEALRELKKVTDD

SEQ ID NO: 18600 - protein, 55 aa, Artificial Sequence
  Synthetic
EEILKKVRELIEETKRRTDDLHKKVKERVDDIKRRLDELLEEAKRALDEIRERVK

SEQ ID NO: 18601 - protein, 60 aa, Artificial Sequence
  Synthetic
SAVEEIKRRLEEIIRDLERLIDDDRKRVEEMVKRIEDLIKKDEEDVREALKKLEEVVTRG

SEQ ID NO: 18602 - protein, 55 aa, Artificial Sequence
  Synthetic
EEILERADRLVKEIKEKLDRLVKTSEELIRRLEEELRRLHEKVKELMKRAEEKVR

SEQ ID NO: 18603 - protein, 60 aa, Artificial Sequence
  Synthetic
SREDVLREIRRLVEETKKENEKILERLRRLVRTVERRNDEVVKKVRTLVKRLEEEIDKTV

SEQ ID NO: 18604 - protein, 56 aa, Artificial Sequence
  Synthetic
LDELLRKLKEDLDRSKEELKEIEKRVRELLERNKRKTEEVEKEVKRDLDDIRRKLK

SEQ ID NO: 18605 - protein, 60 aa, Artificial Sequence
  Synthetic
SEKEALDEVRKRVEDVRRDNKRILEESERLNRESRKRNRDILERLRKEAEDLKREIDETV

SEQ ID NO: 18606 - protein, 56 aa, Artificial Sequence
  Synthetic
LDKLLEDLERLLKENLDRLRKILEEDRRLNKENNDKLKEIEKRVRELLKDIKDKLK

SEQ ID NO: 18607 - protein, 60 aa, Artificial Sequence
  Synthetic
KEVEDVLRKIRDLVRKNLEDAERVVEEAKRLIDENRERLREVLREDEELNREILKRLREL

SEQ ID NO: 18608 - protein, 56 aa, Artificial Sequence
  Synthetic
EEALKEVRRLIDELRKANKRILEEIRDLVRRLREENEEILRRLKRKNERTADEIRK

SEQ ID NO: 18609 - protein, 60 aa, Artificial Sequence
  Synthetic
SEVEDVLRRIRELLEEIKRRLEDVRRRIKELLDRNRRESEDVLRRDKELNDEVRDKLRKR

SEQ ID NO: 18610 - protein, 56 aa, Artificial Sequence
  Synthetic
ERMLKTVEDLVREVSKEVRRILEELRDEVRKSEEENRRILDKLEKENRKTAEDVKR

SEQ ID NO: 18611 - protein, 60 aa, Artificial Sequence
  Synthetic
SEVEEVLRRIKELLDRNREELKKVRERIKRLLDRNREKSEEVRERDKRLNDEIKKRLDED

SEQ ID NO: 18612 - protein, 56 aa, Artificial Sequence
  Synthetic
KRVLEEARRLVKKSEEDNRRILKELRELVKESERENEEILRELKKLNEDTKKRIED

SEQ ID NO: 18613 - protein, 58 aa, Artificial Sequence
  Synthetic
DEVEEVLRKIEELIRENIKRAREVLEEDKRLNERNKRESEKVLEEDERLNREIEKELR

SEQ ID NO: 18614 - protein, 56 aa, Artificial Sequence
  Synthetic
EEVLRRIKKLIEESMEDNERILRDAERLNRESKERNERILKRLKKRNDETRKEVEK

SEQ ID NO: 18615 - protein, 59 aa, Artificial Sequence
  Synthetic
SSAEEVKERSKRINEEIEKTLEKMLRESRRTNEEIKKTLKRLAEEAEKLLRDVERLVRA

SEQ ID NO: 18616 - protein, 56 aa, Artificial Sequence
  Synthetic
EDIIREIRELNKRTRDKIEEIIERIRKLNKETRDRIRKIMREIEKKIRDLAEEIRR

SEQ ID NO: 18617 - protein, 59 aa, Artificial Sequence
  Synthetic
KSMEEARKKSKEINDRILDRLKKVLEESRKINKDIKDTVERLRERSEDINRRIKELVDS

SEQ ID NO: 18618 - protein, 56 aa, Artificial Sequence
  Synthetic
EEIIKEIRKLNEETRKEIERIAREAEELNKRTADKIETIIREIEKLNKKLKDDIEK

SEQ ID NO: 18619 - protein, 60 aa, Artificial Sequence
  Synthetic
DEVRELVKEIEELIERIERTLRKMTKDSRDLNRKINEKLKKVLEDSRRLNEEIKRTIDSN

SEQ ID NO: 18620 - protein, 56 aa, Artificial Sequence
  Synthetic
ESILRRLEKLLEELRKRVEDIIRELEKLNKESREEIDKIIREAERLTEETERRARK

SEQ ID NO: 18621 - protein, 60 aa, Artificial Sequence
  Synthetic
DEMEELLERIRRLIREIDERLKEMLKRSRELNRELNERNKDVLRRIKELIDRIRRLIERD

SEQ ID NO: 18622 - protein, 56 aa, Artificial Sequence
  Synthetic
ERILRELKKLVDDLRRRIKKILDESKELLERSEKKADESNKELRKLVEELRKEADD

SEQ ID NO: 18623 - protein, 60 aa, Artificial Sequence
  Synthetic
SRVEEIERRIRELIKRIEDRNRKMLETSRRLNEDINRRLRELLERIRKLIEEIEELIKRD

SEQ ID NO: 18624 - protein, 56 aa, Artificial Sequence
  Synthetic
EKILRDLEELLKELARRLERSNEESRRLLEDSRRKMEKIIRELEKLLDDLRRKIEK

SEQ ID NO: 18625 - protein, 60 aa, Artificial Sequence
  Synthetic
DEKEIDEEIERLVRDSKRRSRKVLRDIEELAKRVKEENDRVLEKLRKLIEDLKRKIDETI

SEQ ID NO: 18626 - protein, 55 aa, Artificial Sequence
  Synthetic
ERLKEEVDRVIADSRRLNKEILDEVKRELDKLRKHLEDVLRRAEKMIRDIDEELR

SEQ ID NO: 18627 - protein, 59 aa, Artificial Sequence
  Synthetic
SEVDKVREDVERLSARSEEKVREVLERVKRLLDKSKRDNEDVKRRVRELAERLRDLRRK

SEQ ID NO: 18628 - protein, 56 aa, Artificial Sequence
  Synthetic
KEVLDRIRRRIEENSKKIDDMVKKVRTLVKRSEEESERVLKELRDLMRDVERRIRE

SEQ ID NO: 18629 - protein, 60 aa, Artificial Sequence
  Synthetic
SEVERVEKEIRDLSRKSNEDLKRILDEARELSKKSNEDTKRVLKETRDLLKEIADRLREV

SEQ ID NO: 18630 - protein, 55 aa, Artificial Sequence
  Synthetic
EEVKKRVEESLRENEKLLRTIAKEIEDLVRENRKVNEDVNREVEKLVRELEERIK

SEQ ID NO: 18631 - protein, 61 aa, Artificial Sequence
  Synthetic
REVEELLKRIRELVKRNNEKTKRLLDESRRLNEEANRRLDKVLKELRDLAKRIKEELDEKG

SEQ ID NO: 18632 - protein, 55 aa, Artificial Sequence
  Synthetic
EDLEREVKKLLDENRESSERVIRESEKSLRDHAERTRKVREEIRKLLEELKRAVE

SEQ ID NO: 18633 - protein, 56 aa, Artificial Sequence
  Synthetic
SEKEDIKRKLDDLLRRHREVSRESNRELKRLLEEHRRTSKRLDDEIKRLLREIEEA

SEQ ID NO: 18634 - protein, 56 aa, Artificial Sequence
  Synthetic
TETVRKEIEDIARRSKEKLEKNTRDVKRMVDRSKEELKRILKELEDAIREIKKKVD

SEQ ID NO: 18635 - protein, 60 aa, Artificial Sequence
  Synthetic
SEKERILERLKELVERSNEKLERILRRSEKLFTDSNKELKDILDRARKLIEEIDDRIRKV

SEQ ID NO: 18636 - protein, 55 aa, Artificial Sequence
  Synthetic
KKIRDDAERLITENKERNERVNKRDEDLLRRNRKENEELNRELERLVKEIREKLK

SEQ ID NO: 18637 - protein, 60 aa, Artificial Sequence
  Synthetic
EEKERILETAKKLAEEIKRRAEEILKRSEELVRDSNKKLREVLEEARRLIKKIEDEIREI

SEQ ID NO: 18638 - protein, 55 aa, Artificial Sequence
  Synthetic
KEIEDEVRRLVREIEELLRDIERRDKELLDENRKLNEEVNRDAERLVRKIRKALE

SEQ ID NO: 18639 - protein, 60 aa, Artificial Sequence
  Synthetic
SEVEELLRRIRELSKRSKDEIKRMLKEIRELSEKSKRDIERMLRRNEDLARKIKELIDRD

SEQ ID NO: 18640 - protein, 55 aa, Artificial Sequence
  Synthetic
EEIKREVEKLLEENRKLLEDLEEDVKRLIEENKRALEEVERESKRLNDESRERTK

SEQ ID NO: 18641 - protein, 57 aa, Artificial Sequence
  Synthetic
DDLERVLKEIKKAADKIREDNKRTADKIRKRVKELDDETRDMLRRIRKLVKEIKERV

SEQ ID NO: 18642 - protein, 59 aa, Artificial Sequence
  Synthetic
DEALRRVEEEVERLIRDLRRVLKETSDRVRELIDKHRRLSEEVEKDVKRLIDELKKKTD

SEQ ID NO: 18643 - protein, 61 aa, Artificial Sequence
  Synthetic
SEIEEILERIKKISEDSKRRLEDILRKAKKISDESRETNKKTLEDVRRIADEIRKRLEEAG

SEQ ID NO: 18644 - protein, 59 aa, Artificial Sequence
  Synthetic
KDKLERVEREIRRLIKENKDIVERIERAIEELVRRNEKSVEDSKKDIKRLVDELDREAR

SEQ ID NO: 18645 - protein, 57 aa, Artificial Sequence
  Synthetic
SEVERIKERIDKLVEENRKLVEEIEEEDRRLLEENREIVKRIEEEIEKLLRDLERRV

SEQ ID NO: 18646 - protein, 59 aa, Artificial Sequence
  Synthetic
EDVLRDILREIERLSKESKDRLKDLLRKSEELSKESKKLLKDILKKVEDLIREAREEAR

SEQ ID NO: 18647 - protein, 60 aa, Artificial Sequence
  Synthetic
EEKERLKKSLEDLAKRIRDILRKHEEDSRRLSKEIRDVLRRHREASRKLVEEIKELIKSV

SEQ ID NO: 18648 - protein, 59 aa, Artificial Sequence
  Synthetic
EEMLKRVLEELERIVRDIERRIKEASERIRKIVEDIKKRIKEADDRIKDIVREIAERIR

SEQ ID NO: 18649 - protein, 60 aa, Artificial Sequence
  Synthetic
DEEEEALKDVERLLRRNEKLIEEHERRSEKLLRELEDVVRRHEERSKELLERIRERIKRL

SEQ ID NO: 18650 - protein, 55 aa, Artificial Sequence
  Synthetic
EEVLKKLRKLSKESEDDIRKMSEEVEEIVRRIKRLLEEATRKLEELVKRIEERID

SEQ ID NO: 18651 - protein, 60 aa, Artificial Sequence
  Synthetic
DEDEEAKREVERLLRENEKLIEDHKRLSEELVRRLEDLIRRHEETSERLLRELREIIKRQ

SEQ ID NO: 18652 - protein, 55 aa, Artificial Sequence
  Synthetic
EDVLRELRDLSRRSKEEIKKMSEEIEKLARDILKRIREMTEEAKRIVKEIKDRIR

SEQ ID NO: 18653 - protein, 61 aa, Artificial Sequence
  Synthetic
SEIERVLKELDEVSKKSLEEIRRMSEESRRLSKESIDRIREMLERAREKADRIRETIKREG

SEQ ID NO: 18654 - protein, 59 aa, Artificial Sequence
  Synthetic
KDKLRRLRERVEELKKRNEDLLKEHRDENKRLIDENRDLVDKLRKTIKRLIDDLERRVR

SEQ ID NO: 18655 - protein, 60 aa, Artificial Sequence
  Synthetic
SKVDELRKTVEKLLRELRDSLRRYEEESKRLLEELDDSLRRSKKTVEDLLREIKEILKRV

SEQ ID NO: 18656 - protein, 55 aa, Artificial Sequence
  Synthetic
DRAKERLERLVRKIKEDNKRSLTENERLVRKIKKENEDAIRRLKDVAKKIKEELT

SEQ ID NO: 18657 - protein, 57 aa, Artificial Sequence
  Synthetic
SEKEELKKEIRRNLEENKDVLRRHEEENRRLKKRIKELLERHARTNKRLKEEIDRTI

SEQ ID NO: 18658 - protein, 59 aa, Artificial Sequence
  Synthetic
SRLLEELLRKLEKLSRDSKEKLKEISKRSKELVKRIERELEKMTKKSRDLVKKIKEEEK

SEQ ID NO: 18659 - protein, 60 aa, Artificial Sequence
  Synthetic
SEVEELRKELERIVKETKDVAEELSRESEEVLKKSEENLRRLTEKSDDVLRRVAELIRSN

SEQ ID NO: 18660 - protein, 55 aa, Artificial Sequence
  Synthetic
KELKERIERVNREVREEARKHHDKNRDIRRRVTELHKRHKERNEEIRRKVEEDAK

SEQ ID NO: 18661 - protein, 60 aa, Artificial Sequence
  Synthetic
DEIEDLRRKVEKVVRDAEKVLRDLSRKSRKVHEDSRENVDRLLKEVEDVVKRVADLIRSN

SEQ ID NO: 18662 - protein, 55 aa, Artificial Sequence
  Synthetic
EELKRTLEELLKRVEDLVRRHHEENKKLTDDNRRLHRRLRERLKEVLREVERRRD

SEQ ID NO: 18663 - protein, 60 aa, Artificial Sequence
  Synthetic
SDVERIEEELRKLTEENRKLTETLKTELRKIRREVEKILKELEDRLRELSERVKDLIRKR

SEQ ID NO: 18664 - protein, 59 aa, Artificial Sequence
  Synthetic
KEVLDDIRRKLKKLHDESKKTHRDILERLKEALKRLLELAERVLEELERRAEELRREIK

SEQ ID NO: 18665 - protein, 60 aa, Artificial Sequence
  Synthetic
DDVERLEERLKELDKRNKELTKDLEDKLRKLTRDNRELLKKIEKRLEEVRREVKRLITER

SEQ ID NO: 18666 - protein, 59 aa, Artificial Sequence
  Synthetic
KEVAERIREELERLHEESKRLHEKILEDLERAHDETRRIVEDILRRLEKVARELKEEIR

SEQ ID NO: 18667 - protein, 57 aa, Artificial Sequence
  Synthetic
DELRELIKTLREILERLLDRSRRLNDKLKEILERIERASKKMNDDDRRRVRRLEEEV

SEQ ID NO: 18668 - protein, 59 aa, Artificial Sequence
  Synthetic
SRRLEDVERVVEEAKRALERSLRENEKSVEDIKKRIRESVEENKKSVRDTLERLKRTLE

SEQ ID NO: 18669 - protein, 57 aa, Artificial Sequence
  Synthetic
STEEEVRKRVEEIERTLRESLERNRETVERSEERLEELLRRARRVVEESKKRLDKEI

SEQ ID NO: 18670 - protein, 59 aa, Artificial Sequence
  Synthetic
DEVMRDLIRKLEDILRRLKEESDRLNEEHKEILKELVRRLEEIIKEHREIVERILKKTR

SEQ ID NO: 18671 - protein, 56 aa, Artificial Sequence
  Synthetic
DEEEEVKRLLDRIREEVKRLHDENKKRLDELRRTVDKLLRESERENKRVNDEVRKD

SEQ ID NO: 18672 - protein, 56 aa, Artificial Sequence
  Synthetic
VETLKRRIEDVLRRVEEESRRLNKELEDVLRRAKELVDRSKKKLEEVLRRVKEKAK

SEQ ID NO: 18673 - protein, 56 aa, Artificial Sequence
  Synthetic
DEEREIEELLRTLTREVKRLLDESRKLNEEILRKVKRLHDENRKRIREVLEDVKRR

SEQ ID NO: 18674 - protein, 56 aa, Artificial Sequence
  Synthetic
VETLKEEVKRALEEVEKRVRDSKRDLKRVAEEVEETSRRLNDELRKVREDVRRRAT

SEQ ID NO: 18675 - protein, 61 aa, Artificial Sequence
  Synthetic
EEAERIADEARKVEEDVRRMVEESKRKLKKVLDDSKRLIDELKRRLEDIRRKVAEMAKRLR

SEQ ID NO: 18676 - protein, 59 aa, Artificial Sequence
  Synthetic
ERVLRDIERLLEEIRRELERLARESEKVNERVNREDRRLLEEIRELLERIRKELEERTR

SEQ ID NO: 18677 - protein, 56 aa, Artificial Sequence
  Synthetic
SLKEEVDELLRRIEEEIRRLADKSRRTNERVKEEIDRLARESEETNKKLKKKIEDI

SEQ ID NO: 18678 - protein, 59 aa, Artificial Sequence
  Synthetic
AKIVKKLLEDLKRLLKEVKELMERINKETKELLERVAREVKRLNTDTERLLKEVEDRVR

SEQ ID NO: 18679 - protein, 60 aa, Artificial Sequence
  Synthetic
SEREEIEELSRRSRRSLEELKKEIRKVNERNKRLLEELEREIRRVSKESRDRLRELRRRL

SEQ ID NO: 18680 - protein, 56 aa, Artificial Sequence
  Synthetic
TKDLIRRLRELTRTIERRATELIKRLEEVSREIAERVRKLIKELRDMTRKIDEDAR

SEQ ID NO: 18681 - protein, 59 aa, Artificial Sequence
  Synthetic
SEVEKLLERLKKILEEIARLVDRSNTEDDKILRKAEEDVRRLLDKLKKILERAAELLAR

SEQ ID NO: 18682 - protein, 59 aa, Artificial Sequence
  Synthetic
EKLRREIRKLVKELKETIKRLEKKSRDTVKRTEDELRRLEEEAERLITELKERLDELRK

SEQ ID NO: 18683 - protein, 60 aa, Artificial Sequence
  Synthetic
REDEEMLKDLKRVLEDAERVSRDTLRELEDAVRRLHELSEDTLDKLRKVLEEADRLIRSN

SEQ ID NO: 18684 - protein, 55 aa, Artificial Sequence
  Synthetic
EDVRRILERVRKELKRLLEENEKLLRRVEKELEENERRNEEEIRRVKKTVEERAK

SEQ ID NO: 18685 - protein, 59 aa, Artificial Sequence
  Synthetic
SRVEEVLKENRDTNEELKDTVRKILETNRRTLERAEEEVRKILEDLRDIARKIEEMVEN

SEQ ID NO: 18686 - protein, 59 aa, Artificial Sequence
  Synthetic
KEMLERLRRSLEESKETVKRLLEELRKSLEKSKRDVERLLKELEDLLRELEKKVDDRRR

SEQ ID NO: 18687 - protein, 59 aa, Artificial Sequence
  Synthetic
DEAREILTRIRKLLEEIRKEAEEVSERHKRLVDELDKEVKDINKRAEDLLRELAEIVKR

SEQ ID NO: 18688 - protein, 56 aa, Artificial Sequence
  Synthetic
EKEVRKVLEEIKRVLEELKRHAEDNLRRAREVLKKLADEAKRVNERSEELLRELKK

SEQ ID NO: 18689 - protein, 60 aa, Artificial Sequence
  Synthetic
SMADEILRELKELTEEIERRVREASREHRERLEKLRREVREINKELKRRLDELREIVERG

SEQ ID NO: 18690 - protein, 56 aa, Artificial Sequence
  Synthetic
KDRVEKILRENKERTDRLRRHIEKNLEDARDLLRKLKEEVKRVNEESEKSLRDLRK

SEQ ID NO: 18691 - protein, 60 aa, Artificial Sequence
  Synthetic
SLEEDIRRILDENRRSTERIKEEIREINERDKRSLEDIERRIRKVLEDLRKLLEDLAREG

SEQ ID NO: 18692 - protein, 59 aa, Artificial Sequence
  Synthetic
EEAVRKILKEVRDVNEELKRRVEKILEDIRDANRRLRETVEEIIRRAKEAVDKLRDEVR

SEQ ID NO: 18693 - protein, 59 aa, Artificial Sequence
  Synthetic
SEKERVDDLLRRVDELLKRSKREVEKLLEDNKRLLERIERENRRLTKELEDKVRRLKEK

SEQ ID NO: 18694 - protein, 56 aa, Artificial Sequence
  Synthetic
VEEIAKEIRDVLREHKELIDEIRKKAKKISDKSRKLMEELERHLRRVIKELDEKAR

SEQ ID NO: 18695 - protein, 60 aa, Artificial Sequence
  Synthetic
SEEEEVEELLRRNRKKAEEVDREIDRLLKEVEKLVKDSRKRIEDLLRRAREKVEDLRRKG

SEQ ID NO: 18696 - protein, 56 aa, Artificial Sequence
  Synthetic
VREISEEIERITRETEDRIRKIAEEIRRVLKRHKELIEELEKEIRDVLKKLDDDVR

SEQ ID NO: 18697 - protein, 57 aa, Artificial Sequence
  Synthetic
SEIEKLLKDLRDLLKKSEETVREMLKRLEEIVRRAEEDHKRLLEKLKRLLEKLRRDV

SEQ ID NO: 18698 - protein, 59 aa, Artificial Sequence
  Synthetic
EEVRKRLEDLADEVDKRNRDIERKIRELMKRAKEVSERLNKELEDLAREAEKLLRELKK

SEQ ID NO: 18699 - protein, 57 aa, Artificial Sequence
  Synthetic
DEIEELLKRLRDIVRKIREDHERLSRESERINKDARRRHDEMLRRLEELLRKVEKEV

SEQ ID NO: 18700 - protein, 59 aa, Artificial Sequence
  Synthetic
EKVKRDIERIRKEVKEESKRLNDHIRDNERRNKESSEELNRRIKKIADEVRELLEKLKT

SEQ ID NO: 18701 - protein, 56 aa, Artificial Sequence
  Synthetic
REEERLRELMDESRKRIEAVEKRARDLKRKSDRLIEDAARKIKTILDKIRKLIEDL

SEQ ID NO: 18702 - protein, 56 aa, Artificial Sequence
  Synthetic
LKDVEKKIREVNKTVKEEVDRLVEKNERLNDEARRVVKELLDKVERMLEEVEREAR

SEQ ID NO: 18703 - protein, 60 aa, Artificial Sequence
  Synthetic
SEKEDMARKIKELIDRDRERIERVIREIEKLIKELRDHNKRVLETDKRLLDDLKRVADDG

SEQ ID NO: 18704 - protein, 55 aa, Artificial Sequence
  Synthetic
EDLRRLKEEVDRVAEETRRLLEEIKKKVDKVVREVETSNRRSEEEVRRLLDEIRR

SEQ ID NO: 18705 - protein, 60 aa, Artificial Sequence
  Synthetic
DEKEEAARRVEKLITELRKHNEDVLRDIKRLIDELRRHNEEVLKRDRELLERLRKVAEEG

SEQ ID NO: 18706 - protein, 55 aa, Artificial Sequence
  Synthetic
KELDDLRKRAEDVLRDLRRTNRKILEDVRRVIEELERSNERSLTEVERLLREVRK

SEQ ID NO: 18707 - protein, 59 aa, Artificial Sequence
  Synthetic
SEKERVLTELEKILEELRRRVEEILKEIEKLIEELRRHNERALERDKKLLEELKEVRER

SEQ ID NO: 18708 - protein, 55 aa, Artificial Sequence
  Synthetic
RELEKVKEKLDRLMKDIKEKLDRVKEKVRRVLKELEESNRKSEKDAKELIDRIRK

SEQ ID NO: 18709 - protein, 57 aa, Artificial Sequence
  Synthetic
SEVEDLLRDIERLIEESRRLVERLLERLEELIRRHTRLVEELIRELERMLKKVADEV

SEQ ID NO: 18710 - protein, 59 aa, Artificial Sequence
  Synthetic
DEIRTEIKKVVDKAREVNKRIKELIDKIKREAEENSKRANELIERITREIRRLLEDLRR

SEQ ID NO: 18711 - protein, 60 aa, Artificial Sequence
  Synthetic
SELEELRKRVKDLIRETKKLVEEVAEKVERLNKETKKLLEDVARIVEELIRRAEEVAERI

SEQ ID NO: 18712 - protein, 59 aa, Artificial Sequence
  Synthetic
EEVLRDIERLAREIEKVNREAEERIRRLKKKSEETNERVKRAIDKLAEELRRVLEEIRR

SEQ ID NO: 18713 - protein, 60 aa, Artificial Sequence
  Synthetic
SELEELAKAVEKLLEDLRRMTREVEEKVKEINERTKKLLKDVAERVKTLLREIEELAKKI

SEQ ID NO: 18714 - protein, 59 aa, Artificial Sequence
  Synthetic
REVLKAIKELMERIKKTLDEIRKRIKELEDESEKTNRELKKKIEDLKRELEELLREIKR

SEQ ID NO: 18715 - protein, 61 aa, Artificial Sequence
  Synthetic
SEIDEVIKTLEKLLEDLRRELEELSRRNKKVLEDILRRVKRLSDENRRLLERIKRTVDKRG

SEQ ID NO: 18716 - protein, 59 aa, Artificial Sequence
  Synthetic
EKIEKKVKEVRERVKEVLERIERLVDENRRENKEVVDRIKKLLKENEEEVREVLKRIRD

SEQ ID NO: 18717 - protein, 61 aa, Artificial Sequence
  Synthetic
SEIDDLVKKNKELVKKIREDVERLSEENKEVLKDIERKVRKVSEENDRLLEEIKDTVRKRG

SEQ ID NO: 18718 - protein, 59 aa, Artificial Sequence
  Synthetic
RKVEKKVRENKKENEDVLRDIERLVKENKDRNREVLKRIEDLLRKNAERVKRVADEIRR

SEQ ID NO: 18719 - protein, 59 aa, Artificial Sequence
  Synthetic
KEVEDIVDDVRRVIEELKRKVEEVSKKNEKLVREIEERVERISRRNKKLIKELKEIVDR

SEQ ID NO: 18720 - protein, 56 aa, Artificial Sequence
  Synthetic
EELLRKIARDLEKVREEIKELVKENRKTNEEVVRRIEKLAKENDDENRKVLKEIED

SEQ ID NO: 18721 - protein, 60 aa, Artificial Sequence
  Synthetic
DEVERIVEDIRRLLDEVRREVEKVSRENKELVDRVREKVKEISKRNKKLAKDLTDLVREG

SEQ ID NO: 18722 - protein, 56 aa, Artificial Sequence
  Synthetic
KELLDRIKEEIERVIKEIRELVEENKRTNEEVLRRIRELARRNEEENKRVLEDIRR

SEQ ID NO: 18723 - protein, 60 aa, Artificial Sequence
  Synthetic
SVEELIKEVKDRLRKVLREIEELIRENEEENRKNVEDVKRTADKLRRDLEKVVDEIDKRV

SEQ ID NO: 18724 - protein, 59 aa, Artificial Sequence
  Synthetic
KEVIDKVVKRVEDLVREIKEEVDKISEENKELVKRDTRRVEEVRERIRKLVEELRREVT

SEQ ID NO: 18725 - protein, 61 aa, Artificial Sequence
  Synthetic
SEIDRVIEKSDKTNEEIKRDVDRAVRRSEETLKRIRETVEEIVKTVEKLIRDLRRRVEDKG

SEQ ID NO: 18726 - protein, 56 aa, Artificial Sequence
  Synthetic
KDKAKELRDRLERSLREIAKKIKKVLDDTDRVLRDIERTIEELKKRLREVLERVRK

SEQ ID NO: 18727 - protein, 61 aa, Artificial Sequence
  Synthetic
SEIDDVIKKLKDLIEELEREVKEMSDENKRLLEEIEERVKEAIKRSKDTLEEIADRVRKKG

SEQ ID NO: 18728 - protein, 56 aa, Artificial Sequence
  Synthetic
KDKATKIEKDLRDVLRKIEKTMEDNRRENEELLKKVEEEVRRLEEETEKVLRDLRR

SEQ ID NO: 18729 - protein, 60 aa, Artificial Sequence
  Synthetic
SEVDEILKRIEELIRRIEDEVEKMIRESEDTIRRDEKEVKDAVRELADLIRRIEKRVRER

SEQ ID NO: 18730 - protein, 56 aa, Artificial Sequence
  Synthetic
EKKVREIDKRLKDALREIRKLIERSKEESRRALKRSRELMKRLEEELRRVLKEIRD

SEQ ID NO: 18731 - protein, 61 aa, Artificial Sequence
  Synthetic
DEVDKVLKRIKELIDEDKKEVEKVIRDSKRTLREDEERVRRAAKEVEDRIRDIEDIVRRRK

SEQ ID NO: 18732 - protein, 56 aa, Artificial Sequence
  Synthetic
KKKLEDIDRELDRVLEESKKEIEKSKRESEEVLKKSRDLVKRLAEELKRVLDEIRR

SEQ ID NO: 18733 - protein, 60 aa, Artificial Sequence
  Synthetic
SRVEEVLKEIDKLIKEIKERVKRLIEESKRLNREDEERVRKVIEESKKTLEEIREVMERN

SEQ ID NO: 18734 - protein, 56 aa, Artificial Sequence
  Synthetic
KDLLREIERRLREMLKEIEERIRRSKREVEESAERSERLIRKSEEDSERVLRELRR

SEQ ID NO: 18735 - protein, 60 aa, Artificial Sequence
  Synthetic
DEVERILERIEELLRKIRKDVEEAIKDSERLNKDDLKRVRDAVETLRELIRRIEEEVRRR

SEQ ID NO: 18736 - protein, 56 aa, Artificial Sequence
  Synthetic
KDLARDIDEKVRRLLEDIRRLVEESEKKVDESTEESRRLVTELERELREVLKRIRD

SEQ ID NO: 18737 - protein, 57 aa, Artificial Sequence
  Synthetic
SRVDELVKEAEDLLEEAKKANAESIRRIEELLKRVAEEIRRLSEEDKKLVEEVRKRV

SEQ ID NO: 18738 - protein, 59 aa, Artificial Sequence
  Synthetic
KRAEDKLRRVEEDARRVLEDLKRTLKRLEEEVRRVLEEARDILRKNAEENRKVLEDLRR

SEQ ID NO: 18739 - protein, 57 aa, Artificial Sequence
  Synthetic
SRVEELVEELKRLLRTVEKENEDSIREIERLLREVKRRNEESSREDEKTIRTVRREV

SEQ ID NO: 18740 - protein, 59 aa, Artificial Sequence
  Synthetic
KRAEEILERLRKEAEEVLKKLEDTLRELRKRAEKVLRDMEETLKKNKKDNEKVLRDLRK

SEQ ID NO: 18741 - protein, 57 aa, Artificial Sequence
  Synthetic
SEVDKIIKEIEDLLDEARKTNEKSSRDDKRLVEEVKELNKESSERNKRLVKEAREKI

SEQ ID NO: 18742 - protein, 59 aa, Artificial Sequence
  Synthetic
KRAEDKIRRIAKDAEDVLRTMEKTLRDNERENREVLKELEKTLRENEKENEKVLRDLKR

SEQ ID NO: 18743 - protein, 56 aa, Artificial Sequence
  Synthetic
EEIERVEEKVRRLIKELEDELRKIEERIERLLRRSRERNKEISDRNRRLLEEMRRS

SEQ ID NO: 18744 - protein, 56 aa, Artificial Sequence
  Synthetic
EEKARELEEELRRAVERVDRKIEELEERLDRVLKESRDTVDENEKRNEKVLRELET

SEQ ID NO: 18745 - protein, 56 aa, Artificial Sequence
  Synthetic
KEIEDVVETVRRLLRTSEELNERISRDNEKLLRDSEKLNREISERNRKLLKDLKDS

SEQ ID NO: 18746 - protein, 56 aa, Artificial Sequence
  Synthetic
EEAARDLARKLKEVHDRSRETIKRNEDKNRRVLEESKKTARENEERNKRVLDELRK

SEQ ID NO: 18747 - protein, 60 aa, Artificial Sequence
  Synthetic
SEEDRVLEDVERLLRELKKETDRIAEKNKKLNEDVTRETEEIVRRVRELLERLLDLVRKV

SEQ ID NO: 18748 - protein, 56 aa, Artificial Sequence
  Synthetic
SEKAREVEREVRRIREEDERILRELEERNRENKKRDEDILKELEDRAERVLEEIKR

SEQ ID NO: 18749 - protein, 60 aa, Artificial Sequence
  Synthetic
SEEDRVLKEAKDLLEEIERELDEVAERNKELNKRLTDETRKIERRVRELLRELKDKVRKV

SEQ ID NO: 18750 - protein, 56 aa, Artificial Sequence
  Synthetic
SRKLEKLEKEVREVEKRIRDILKKLEDDNRANRKRDEDIIDELRKEADRVREEIKR

SEQ ID NO: 18751 - protein, 59 aa, Artificial Sequence
  Synthetic
SEVEELVRRVEKSNRDIEEMVKKIDKRNRDLLRKIEKDLREADRRNEELLREIDDLVRR

SEQ ID NO: 18752 - protein, 56 aa, Artificial Sequence
  Synthetic
EKLLKEVEDRNRESAKEVKRLADENRKANEELKRRVEKLVRDNRRKNEELKKKVKD

SEQ ID NO: 18753 - protein, 59 aa, Artificial Sequence
  Synthetic
REVEELLKEIRKRIEDVRRRVEEIDRRNRKLLKEVEERLEKVRREVEKSNTDIKELAER

SEQ ID NO: 18754 - protein, 56 aa, Artificial Sequence
  Synthetic
EDLLRRVREEIERVIREVKRLLEENKKRNDEVRKRVEDIVRRLEEHHRELKRRVEK

SEQ ID NO: 18755 - protein, 56 aa, Artificial Sequence
  Synthetic
KDIEDILKESEKTNREILKRAEDASEENERINKRITDRVDRVRKEIERLLEELTRR

SEQ ID NO: 18756 - protein, 56 aa, Artificial Sequence
  Synthetic
KKLVDELRRRVEETLKRLRKLIADNREKNKDNLRRIEEEVKKLEEEIKKIKDEMKR

SEQ ID NO: 18757 - protein, 56 aa, Artificial Sequence
  Synthetic
KELEDIARESEKTNRDIKRRVDEVRKTIEDLLRRIDEEVKRAAEESKDTNRRIREE

SEQ ID NO: 18758 - protein, 56 aa, Artificial Sequence
  Synthetic
EDLMRKLKREVEETDKEIKDIIRRLKEEIEKIKRKIEEIIKKLKKENEDTRREADK

SEQ ID NO: 18759 - protein, 56 aa, Artificial Sequence
  Synthetic
SDIDDILRESRKINKEINDTVTEMMKRSKKTNDEIREKVKEVREESEKTNEEIRRE

SEQ ID NO: 18760 - protein, 56 aa, Artificial Sequence
  Synthetic
EKLVKELEDELRKSEERARRIIERLKEELKKTRKEIEDIIRELRKKLEDTLRDVEK

SEQ ID NO: 18761 - protein, 56 aa, Artificial Sequence
  Synthetic
SDIEKILRESKDINRRINERVDRVVERSKKTNEDILKKVKDAAEESKKTNDDIRKS

SEQ ID NO: 18762 - protein, 56 aa, Artificial Sequence
  Synthetic
EELVRELRRLVEESLKRIEKIIKDLEELIKETKRRLEEIIERLEKKNEDTEREARK

SEQ ID NO: 18763 - protein, 56 aa, Artificial Sequence
  Synthetic
DEIREIVKESKRINEEINRKVEEVVRRSEKTNEDIRDTVRRLVRESDETNRRIEES

SEQ ID NO: 18764 - protein, 56 aa, Artificial Sequence
  Synthetic
EDLVRELRKEVKRSEDRIRKIIRDLDELNRRSKEDIKRKIDELRKRVEETKRRVTK

SEQ ID NO: 18765 - protein, 56 aa, Artificial Sequence
  Synthetic
DDIEEILKDVKRLLDEILAKVKKASDDNKRILDEIERKVEEMVRRSEKTNEDIRRS

SEQ ID NO: 18766 - protein, 56 aa, Artificial Sequence
  Synthetic
EELVRELKKRVDEIKERARRLIEENRERNKEIKERAERIIERLRKINEDTKREAEK

SEQ ID NO: 18767 - protein, 56 aa, Artificial Sequence
  Synthetic
DEIEDIVRRVKKLIRDLEERVKKLEEDSDRTNERIRREAEKASKRNKEILDKLRKS

SEQ ID NO: 18768 - protein, 56 aa, Artificial Sequence
  Synthetic
EELVKELRKELEEVKEEIRKIIEELKRRNDKSRRDLERLIRDNEDKNRRLKKEAED

SEQ ID NO: 18769 - protein, 56 aa, Artificial Sequence
  Synthetic
EEIERIIRESEKINKEINRTVKEVEKRSEETNRRIREELKRISKRNKEILDRLRKE

SEQ ID NO: 18770 - protein, 56 aa, Artificial Sequence
  Synthetic
EKEVEKLKRKVEKSEEDIRRIIEKLREENKRSEEEVRRLITENEKRNRKLLEEAKK

SEQ ID NO: 18771 - protein, 56 aa, Artificial Sequence
  Synthetic
SELEKIAEDSERINKEINERVKRISDENKRILEEIEKAVEEASRDNKRILDELRKS

SEQ ID NO: 18772 - protein, 56 aa, Artificial Sequence
  Synthetic
EELVRELERRVDESRKRAEDLIRDNKKKNDEARRRVEELIRRNREENRRIAEEARK

SEQ ID NO: 18773 - protein, 60 aa, Artificial Sequence
  Synthetic
SDAERIMRESEELNERINDVVRRVAEESKRLNDRINDVLREVSKRNKDLIKRIKEVVDRN

SEQ ID NO: 18774 - protein, 56 aa, Artificial Sequence
  Synthetic
ERIIERLDRLTKKSLEELKRIIEDLKRRTKESEDRARELIKRNREENKRLLEEAEK

SEQ ID NO: 18775 - protein, 60 aa, Artificial Sequence
  Synthetic
DEAERIREESEELNERINREVDKMIDEDRKLNEDIRRTVEEMVREIKELLDRIRKVLEEN

SEQ ID NO: 18776 - protein, 56 aa, Artificial Sequence
  Synthetic
KEIIKELRETTERSRKRLEELIRDSEEKNRRTEDELEKIIRELDERLRRLEEEARK

SEQ ID NO: 18777 - protein, 60 aa, Artificial Sequence
  Synthetic
DEAEDIARKSRELNERILRRVKEMIDEDRDLNREIEKTLRRVSERNRELVEEIKREVERN

SEQ ID NO: 18778 - protein, 56 aa, Artificial Sequence
  Synthetic
ERIIEELRRLTEDTKRRADKLIKDSEDENRKTLRRARELIEENRDRNRKLEEDVRR

SEQ ID NO: 18779 - protein, 60 aa, Artificial Sequence
  Synthetic
DEVREIVKRSDDLNDTIREVLKRVADDSRRLNEEIRRKVTEASRENEELIKEIEDRARKN

SEQ ID NO: 18780 - protein, 56 aa, Artificial Sequence
  Synthetic
EEIIKRLRDRTKKTLDEVRKIIEDLKDESRKTSEELRELIKRNKEKNDELLERLER

SEQ ID NO: 18781 - protein, 60 aa, Artificial Sequence
  Synthetic
SEAEKIERESRDLNRRIREVVERASEDNERLIREIRKRLEEVVRTIEKLIRDILERVRKN

SEQ ID NO: 18782 - protein, 56 aa, Artificial Sequence
  Synthetic
EEIIKELKKITDKTRRELERLIDENRKRNEELLKRVEDIIRELKRRLEKLDEEVKR

SEQ ID NO: 18783 - protein, 60 aa, Artificial Sequence
  Synthetic
SEVERIEKESRDLNREIKEEAKRASEDNRRLLEDIRRKLEKVSEENKDLLRKIEEEMRRN

SEQ ID NO: 18784 - protein, 56 aa, Artificial Sequence
  Synthetic
EEIIKKLKRLTDETEKELEKLIRKNEKENRDLEREIRRLIKENRDRNRELKKRAED

SEQ ID NO: 18785 - protein, 60 aa, Artificial Sequence
  Synthetic
SEVEKAVREIEELIKRIEDRLREMARRVEETNKTLLRDVERLSKENEELVREIKERVREN

SEQ ID NO: 18786 - protein, 56 aa, Artificial Sequence
  Synthetic
EELVRELERKIKTVLDRVEEIIRRLDKKTKDTVRRVRELIEDNKRKNKKILDEVRK

SEQ ID NO: 18787 - protein, 60 aa, Artificial Sequence
  Synthetic
SEVERIVKESEELNEKITRDLEEAEKEVRKTNDEIRRVVEEMSRRNEKLIRDIDDEVRKR

SEQ ID NO: 18788 - protein, 56 aa, Artificial Sequence
  Synthetic
DEIIKELEKKTRDNLDKVRKIIERLRRETDKTEKELRDIIRKNEDENRKLEEKVRR

SEQ ID NO: 18789 - protein, 60 aa, Artificial Sequence
  Synthetic
SKVEKLAKEVEETNRRILDEVRRASEENKDLVRRIEETVKRAVEEIKRLIEKIDDVVTKN

SEQ ID NO: 18790 - protein, 56 aa, Artificial Sequence
  Synthetic
EEIIKELRKRSEDSEREARKLIRRNEEENEKLRKKLKEIIDRLREELEKVLDRVRK

SEQ ID NO: 18791 - protein, 61 aa, Artificial Sequence
  Synthetic
SEVERAAEESKRLNKTIRDENREVLREIRDLIRRMKEENRRMVKRVDEVLKEIRELFRRDK

SEQ ID NO: 18792 - protein, 59 aa, Artificial Sequence
  Synthetic
EKVREILERLERESRKTAKELDESNREAEELLKRVADEAKKSNETLRERLERLAREAEK

SEQ ID NO: 18793 - protein, 61 aa, Artificial Sequence
  Synthetic
SELEELIRKIEELIRRIEEENKEMVRRSRKLNEDLERRLDEVRRRVEKLIREIEELLKRDK

SEQ ID NO: 18794 - protein, 59 aa, Artificial Sequence
  Synthetic
ERAKRLLDELKRLIKELEDKLRESNEELKRRSDDSARKAEKILRELKKKVDEMADRARK

SEQ ID NO: 18795 - protein, 60 aa, Artificial Sequence
  Synthetic
DEAEKLAEDVRRVIKRIREDNKRLSDRNKELLEEVEKDNKKSEEDVKRVIEDIERRVREL

SEQ ID NO: 18796 - protein, 56 aa, Artificial Sequence
  Synthetic
RELLDELRRRIEELRKRLEDSNRENEEELRKIADKVRKTNKRLNEEVEDMFRRAKT

SEQ ID NO: 18797 - protein, 57 aa, Artificial Sequence
  Synthetic
DEARELLRDDERLNRELNDLDRDSSKKDEDLNRKLNEDDKESVERADTLLERIKREV

SEQ ID NO: 18798 - protein, 56 aa, Artificial Sequence
  Synthetic
RELIRELEERNRDSVRKSRKSNEDNERTNRESIERSRRSNEELRRRAEELIKDLRR

SEQ ID NO: 18799 - protein, 57 aa, Artificial Sequence
  Synthetic
SEVEELLERDKDLNRRVNELNEKTSREDEKLNDEINKRIDRLVERARELLERIRREV

SEQ ID NO: 18800 - protein, 56 aa, Artificial Sequence
  Synthetic
ERLIRELEERNRESVERVRRSLKENEDRNRESKKRLEDLLREVKRLMDKLEEDLRK

SEQ ID NO: 18801 - protein, 57 aa, Artificial Sequence
  Synthetic
SEVEELLERDKRLNDEANRLNRELVERDKRLNEELNKELKRMADEIKRLLEEIRRKV

SEQ ID NO: 18802 - protein, 56 aa, Artificial Sequence
  Synthetic
ERLIEKLERENRESEKRARDSNKELEKRNRESEDRARRILKKLEDDVRRLKKELET

SEQ ID NO: 18803 - protein, 60 aa, Artificial Sequence
  Synthetic
SELEKVRTDVERVIRELEKELKEIDEENKKVNKDVEEEVKRIEEENKEMNDRLDDLRRRG

SEQ ID NO: 18804 - protein, 56 aa, Artificial Sequence
  Synthetic
SKEMEEVREELERLLRRIKKILEELRDENRKSLERLEDVLRRLEKRNRDTLEEVKR

SEQ ID NO: 18805 - protein, 60 aa, Artificial Sequence
  Synthetic
KETEDVERDVERVIREIDTKLKEIEKKNDKANKELEEKLKKIEEDNKRVNERLKRLREEG

SEQ ID NO: 18806 - protein, 56 aa, Artificial Sequence
  Synthetic
SEEMRRVREEAKRLLDKVKKILRDLERRNEEVLKKIKDIMRRLEKRNRDTLEEIRT

SEQ ID NO: 18807 - protein, 60 aa, Artificial Sequence
  Synthetic
SEEEKVLEEVKRAIDELKKELEEVEERNKRVNDDIRRLTDEIRKENKTANDRLRKLLEEG

SEQ ID NO: 18808 - protein, 56 aa, Artificial Sequence
  Synthetic
SKKLEEVRKEVKRLKDEVEKILKDLRKRNKDLLEEDKRVLDRLRETNEKTLDDVRR

SEQ ID NO: 18809 - protein, 61 aa, Artificial Sequence
  Synthetic
KEEEDITRRIDKILRDLREKLRDVNRRVEELSKRLHDKLEKVLKRIKDEAERLRKEIREKL

SEQ ID NO: 18810 - protein, 55 aa, Artificial Sequence
  Synthetic
KELEDKVEKDARDVERHIRKDLTDVRRRHEDLDRKIKELLDRVRKAIRDVEEKIK

SEQ ID NO: 18811 - protein, 61 aa, Artificial Sequence
  Synthetic
SKAEELLRRVEELLKRVKDKVDDIVRKIEKSNRDLERRDEEVLREVEETNRRLEEELRRRG

SEQ ID NO: 18812 - protein, 55 aa, Artificial Sequence
  Synthetic
EEVLRRLEELIRRAERKLEKMLEDLTRLNKEWEDRTRKLLEDLRRINEEIKRKIK

SEQ ID NO: 18813 - protein, 61 aa, Artificial Sequence
  Synthetic
SEKDELLRDVRRLLKEVEKELEEIRRRVTESNRELEKLVREVLEESKRSDDKLREDLERAG

SEQ ID NO: 18814 - protein, 55 aa, Artificial Sequence
  Synthetic
KDLLERLKELIKRLKDKLKEIADRLRRINEDIERKIREILEDSRRFNEEIKKKID

SEQ ID NO: 18815 - protein, 58 aa, Artificial Sequence
  Synthetic
STLETLEDEVRKIVTDIERVIRESNKHLKKSIDDVERVIEEIERRAREIVKKVRDVIS

SEQ ID NO: 18816 - protein, 58 aa, Artificial Sequence
  Synthetic
EKLERILREIKRIVEDLKKKVEDSLKRYEEELERLKEDLRRLLKRIRDEVEELKKESD

SEQ ID NO: 18817 - protein, 59 aa, Artificial Sequence
  Synthetic
DEEEKLRDEVEKIVKKIEKAIEDLRRHAEKSVTDIRKVLKELEDHIRESVKDAERFISE

SEQ ID NO: 18818 - protein, 58 aa, Artificial Sequence
  Synthetic
EKLEKILREIERIVEKLKEDLDRLLKRYEDELRRLKEELERILDTYRRLLEELERRLR

SEQ ID NO: 18819 - protein, 58 aa, Artificial Sequence
  Synthetic
DTARELEREVKKIVDEIEDVIRRLRRHIEESVKRAEKVLREIEKHARESAKRIADVVS

SEQ ID NO: 18820 - protein, 58 aa, Artificial Sequence
  Synthetic
EELKEILERIEEIVKRLEEELRRLLEEYKKRIEELAKRIKEVLDEYRKILKRLEDETK

SEQ ID NO: 18821 - protein, 60 aa, Artificial Sequence
  Synthetic
DEAEELRKDVKRVLDEIKKRHEELLRKVREDLDRIRRKLEELAKRHRELLKEVKKIVDRD

SEQ ID NO: 18822 - protein, 56 aa, Artificial Sequence
  Synthetic
DKIRREIDELIKKLEEESRRIEEEIKKLVEDLKREADKIMEELERETDKLKKELDK

SEQ ID NO: 18823 - protein, 57 aa, Artificial Sequence
  Synthetic
SEKEKILEEIREVLKRILDRLKKELEDDKKSLDDNKRRTEEALREDKKSLEEIRRAN

SEQ ID NO: 18824 - protein, 56 aa, Artificial Sequence
  Synthetic
DKILRDLEKALDKLRRDIEEILKRSRDLNKKLEDDNREALRRSEELNRELEERERK

SEQ ID NO: 18825 - protein, 57 aa, Artificial Sequence
  Synthetic
SEEERIRREIKKILDDIKEEAERRLEEDKKSLDENRKKTEEVLKKIRDDLKRIEEAK

SEQ ID NO: 18826 - protein, 56 aa, Artificial Sequence
  Synthetic
DEILRRIEKLIEDLKRTIDKILEDSERLNRKLEKENREALKELRDLLRELEERLKK

SEQ ID NO: 18827 - protein, 56 aa, Artificial Sequence
  Synthetic
EELERILRKITEMLREIARKLKKLLEDDKESLDRNKEKTEDDLRRDKESLDRLRKS

SEQ ID NO: 18828 - protein, 56 aa, Artificial Sequence
  Synthetic
DKILRDLEELLKDLERKIRRILDESRKLNDELRKENKKAEDTSRRLNEELEERLRT

SEQ ID NO: 18829 - protein, 56 aa, Artificial Sequence
  Synthetic
SELEEILKRVEDVLRDILRKLKEVLDRAEKVIRDNKRKTKKMLDDDKRSLDEIRKA

SEQ ID NO: 18830 - protein, 56 aa, Artificial Sequence
  Synthetic
DKILRELEKRLEDLRKRIKDILDDLKRKLEELKRENEKFLRRSKKLNEDLERELET

SEQ ID NO: 18831 - protein, 56 aa, Artificial Sequence
  Synthetic
DELEEIRDRIKRKLEKLKEETKRTLEEDRKSLDDNRRKTEEALRRDRESLERIERA

SEQ ID NO: 18832 - protein, 56 aa, Artificial Sequence
  Synthetic
RDILEELTRLLDKLRRDHERVSEESKRRNDELEEENRRVLKESEDRNRELEERLRQ

SEQ ID NO: 18833 - protein, 55 aa, Artificial Sequence
  Synthetic
SELEKLLDDVKKDLKRIEEHLRRDEEDSKRRIEELERHLERDKKEVEKAIRELDK

SEQ ID NO: 18834 - protein, 56 aa, Artificial Sequence
  Synthetic
EKVVRTIEKLLTDLERKIREIEKRSKELLTRLEEKIKKAERESRKLLRELTERIDR

SEQ ID NO: 18835 - protein, 61 aa, Artificial Sequence
  Synthetic
DELKKLLDDVREVSKRLNDELRKIMEEIRKVSEDLNKELDDIVRKIKKVIDDISEKIKRDG

SEQ ID NO: 18836 - protein, 55 aa, Artificial Sequence
  Synthetic
EEIEKEIRELLKENRRRADEIRRRAEKSLKDNERRVEKVEREAERLLREIEKELK

SEQ ID NO: 18837 - protein, 61 aa, Artificial Sequence
  Synthetic
SELEKLAEDVKRKLTEIREKIKKLLKETRDVSRELNKELEDLLRRTTEVIDEIRKKIEKEG

SEQ ID NO: 18838 - protein, 55 aa, Artificial Sequence
  Synthetic
EDIKKEIEDLLRDLERLLRDVNREVEELLKENRKRLEEINRTVERLLEEIEKRLR

SEQ ID NO: 18839 - protein, 61 aa, Artificial Sequence
  Synthetic
SELEELVRRLREVSKRLNEELDRILDRTRRLAERISEDIKRLADETKEVIERIKEEIKKKG

SEQ ID NO: 18840 - protein, 55 aa, Artificial Sequence
  Synthetic
EEIEKEARELLRDNRRRIEEINREVEELIRRLEKLLKEVNETVKRLLEEIRKDLD

SEQ ID NO: 18841 - protein, 61 aa, Artificial Sequence
  Synthetic
SELEKLMKDVKEVIDEIRKKLRKILEDTTRVAKRNEEKLKRIADEAEKVIREIRDEIEKKG

SEQ ID NO: 18842 - protein, 55 aa, Artificial Sequence
  Synthetic
EEIKKRIDDLLRRIEKEIEEINRRVEELHKRLEDLHKEIEDKVRELLTRIEERLK

SEQ ID NO: 18843 - protein, 56 aa, Artificial Sequence
  Synthetic
SEVEEILERIERLIRDDNRKLKDVERRNRENIKEDNERLKRMMEELKKIADEIRKA

SEQ ID NO: 18844 - protein, 55 aa, Artificial Sequence
  Synthetic
DSIRRTVEKLLEDNRRRNEEILKESEDLLRKNREKTKEIVERAERLLDKLRRERK

SEQ ID NO: 18845 - protein, 57 aa, Artificial Sequence
  Synthetic
DEAEELKERIERLSRRIDEEYRRLLEDYERLLRELEKKIEDLKRELEKLVEELRREG

SEQ ID NO: 18846 - protein, 55 aa, Artificial Sequence
  Synthetic
EELKEKVKEIVKRSEEDIRRLKKHLDESIRTAEEVIRRLREKIKRIIDTVRDAKR

SEQ ID NO: 18847 - protein, 57 aa, Artificial Sequence
  Synthetic
SELEELEKRIRRLSEEIKKLLDDLRREYEELVKELRRRLEELRKEIERLSEELKAEG

SEQ ID NO: 18848 - protein, 55 aa, Artificial Sequence
  Synthetic
DEMREKVDEIVKRSRDVIKELREHIEESIRRAEKVLRDLEREVRKIIEDARERTR

SEQ ID NO: 18849 - protein, 56 aa, Artificial Sequence
  Synthetic
REVDELRKEIERLSRKIEDDLKKLEDRYEELLEKLERDLEKLKEDYDRLLRKLEED

SEQ ID NO: 18850 - protein, 55 aa, Artificial Sequence
  Synthetic
EKAEEDVRRTVTESKKVIDELREHIKKSIREVEEAIKRLREHVERSIRRAEEATK

SEQ ID NO: 18851 - protein, 60 aa, Artificial Sequence
  Synthetic
SEEEKLDEDLERLREEIRELHRELEELIKKLREEVRRIIEKVRTHLKRDRDRAKEVIEKV

SEQ ID NO: 18852 - protein, 55 aa, Artificial Sequence
  Synthetic
ERMREKLEKIKKDVDKLSKELHDKLDKVLKEIEELLRDVKRAIKKVNDDIKERLR

SEQ ID NO: 18853 - protein, 61 aa, Artificial Sequence
  Synthetic
DEIRELVRRFEELVRRNVEHLKKLLRDAEKLVKENEKHLEDLLREIEETVKRLLDKIRREG

SEQ ID NO: 18854 - protein, 59 aa, Artificial Sequence
  Synthetic
KDKARDVEKRIEDLNREIKEIIRRVEERLKELNKRIEKLLEEVRDTLRRLKEELDRAMT

SEQ ID NO: 18855 - protein, 61 aa, Artificial Sequence
  Synthetic
SEIEELLKEVERRVRENKKHLKRLLEDIKRLVERNAEDLERILRDAERIVRELIKKIRRDG

SEQ ID NO: 18856 - protein, 59 aa, Artificial Sequence
  Synthetic
KDKLRRIEKALEDLNREIEEILRRVKEEIERLNREIEELLKRVEEELKRLEKELEEELK

SEQ ID NO: 18857 - protein, 61 aa, Artificial Sequence
  Synthetic
SEIEELLKEVRKRVKENAEDLKRLLDEAKKLADDNVKHIEDLIREVEDIIRRLKERIKRTG

SEQ ID NO: 18858 - protein, 59 aa, Artificial Sequence
  Synthetic
KDKARRLREELRKLNEDIERLLKRVEDELRKLNKKIKDILEEVEEVLERLLRELREEER

SEQ ID NO: 18859 - protein, 63 aa, Artificial Sequence
  Synthetic
REKEELKKELKKLIEELKRSHDELKEELKRLLKRIEDILRENRKTTEDLSRELKKLLEELRKK

SEQ ID NO: 18860 - protein, 59 aa, Artificial Sequence
  Synthetic
REELKRLLEELRRMIKELKDRNRKALEELEKVIREIEEEIKDINRRLREEIRRLEEEAR

SEQ ID NO: 18861 - protein, 63 aa, Artificial Sequence
  Synthetic
SKEEELRETLKRLVDEIRRMLEEDRRSDEELVRRIERVLEEDKREDDRLHKRLRDELRRLRKD

SEQ ID NO: 18862 - protein, 59 aa, Artificial Sequence
  Synthetic
EDELRRLLRELEEMAKKLEKELRDNNRDLRRVAEELKELIDDNTRKLKEVIEKLEREIK

SEQ ID NO: 18863 - protein, 63 aa, Artificial Sequence
  Synthetic
SEKETVRDELRKLVETIRKLLEEDKESDKRLADRIRELNEENKEDTERLIRELEKVLEELRKK

SEQ ID NO: 18864 - protein, 59 aa, Artificial Sequence
  Synthetic
EERLRKLLERLERVIRDLLRKIEENNKRLRKAIKELLDELRKINKELREVIKKLLDDAR

SEQ ID NO: 18865 - protein, 63 aa, Artificial Sequence
  Synthetic
SEKERLKEELEKLSKEIEDILRDDKRSDDELRRRLRELLEKDRREDERLNEELKRMLEEARKR

SEQ ID NO: 18866 - protein, 59 aa, Artificial Sequence
  Synthetic
EELLRRLLEKLKRMAEKLKRDIEDNNRKLRKVATELAKEIEDNSEKLREDAKRLSEKIK

SEQ ID NO: 18867 - protein, 63 aa, Artificial Sequence
  Synthetic
DEEEELRKRLEKLSKEVRELLRRDEEEDRRLNRELEELLKDHERTVRDLSREVEDLLRKARRK

SEQ ID NO: 18868 - protein, 59 aa, Artificial Sequence
  Synthetic
EDELRELLRRLEDVIRKLAEDLKRNTEDLRRVIKELAERLEELNKRLKREIRRLKEELR

SEQ ID NO: 18869 - protein, 60 aa, Artificial Sequence
  Synthetic
EKSERLRERLRDLLRKHKELLDRNEKTLEEAERRVEKLLEDNERELKKIEDEVRELLKRL

SEQ ID NO: 18870 - protein, 55 aa, Artificial Sequence
  Synthetic
KEILREIEERFKRLAEDLKRSNDKVRELVDKAEKDIRKSNEELRKLARDVRERVR

SEQ ID NO: 18871 - protein, 60 aa, Artificial Sequence
  Synthetic
SDEDRLRELLRKLREDHERIVRELRKRLEEVLREIERLLKKNEEDLERIRREVEELLKRI

SEQ ID NO: 18872 - protein, 55 aa, Artificial Sequence
  Synthetic
EDIEREIRDTLRRLREDLERIKEDVERLRREIKKRIEDSNRKVRDLLRRVKEAVR

SEQ ID NO: 18873 - protein, 60 aa, Artificial Sequence
  Synthetic
DEERKLEKSLKDVEDTHRRLLEKNDEDLKELRKRVEDMLRRLEDALRRILEDIEEKLKRI

SEQ ID NO: 18874 - protein, 55 aa, Artificial Sequence
  Synthetic
EKILREVEDLLRKVAEDLKRSNDEVKELAERLEETIRDLLRRIEEILKEIEERVR

SEQ ID NO: 18875 - protein, 60 aa, Artificial Sequence
  Synthetic
KDEERLKRFLEDIRRRHRELLERNERALDEIRRRHEELLRRNEEAIKDIERRVRELLKRL

SEQ ID NO: 18876 - protein, 55 aa, Artificial Sequence
  Synthetic
EEILKEIEELLRRLEENLRRNHKEVRELLEKVRRNIEENHREVRRLLEEVERRAR

SEQ ID NO: 18877 - protein, 60 aa, Artificial Sequence
  Synthetic
DEEETLEDVLRELEERVEKLLRDLTRDLERVEKEHKELLKRNKEAIDEIEKRIEELLKRI

SEQ ID NO: 18878 - protein, 55 aa, Artificial Sequence
  Synthetic
DEILRKIEELLRRAEEVIRDLERKVRKLERDIRENIKKNHREVREILRKIEEDVR

SEQ ID NO: 18879 - protein, 57 aa, Artificial Sequence
  Synthetic
KDEERLRELIKRINTEVKKSLDENKERLDKVEEDIRRSLKENEDRMERVRREVEKAN

SEQ ID NO: 18880 - protein, 56 aa, Artificial Sequence
  Synthetic
IEEIKKRLEDILEETRDMSRRLNEELRRILERVKEVSKELNRELEEILKRVEDARR

SEQ ID NO: 18881 - protein, 57 aa, Artificial Sequence
  Synthetic
SEKEDLERELEEVRRRVEESLRKNEEDVKRVRDELKKLLDENRKELERIRREVERAN

SEQ ID NO: 18882 - protein, 56 aa, Artificial Sequence
  Synthetic
MEEIKKEIEKILRDIERVSRELNKKLEEIVRRLKKVSDELNRRIEEIAERVRRRRK

SEQ ID NO: 18883 - protein, 56 aa, Artificial Sequence
  Synthetic
KDEERLDEELKRVNDEVRRLLARNEETLERIEREVKRLLDENEKRAEDIRKEVEDS

SEQ ID NO: 18884 - protein, 56 aa, Artificial Sequence
  Synthetic
IEEIEKTIREELKETRKVSEELNRELERILRELRKVSEELNKDLEKILRRVKKERK

SEQ ID NO: 18885 - protein, 56 aa, Artificial Sequence
  Synthetic
SEEERLREILKDINRRVEELLKENEERMERIREELEELLERLKEELERIRKRVEEE

SEQ ID NO: 18886 - protein, 56 aa, Artificial Sequence
  Synthetic
VEEIEKDIRRLLRETERVSEELNKKLEEIARELREMIKEIKERLKRILEEVEKRRR

SEQ ID NO: 18887 - protein, 56 aa, Artificial Sequence
  Synthetic
SEEDELRRLLKEVNERVERLLDEIRKELEKIAEELRDLLKKNEDKLREIKRRVEEN

SEQ ID NO: 18888 - protein, 56 aa, Artificial Sequence
  Synthetic
TEDIAREIRELMERTRRVIEEIKKELRDILEKLRRVSEELNKKLDEILKRIEDRTR

SEQ ID NO: 18889 - protein, 60 aa, Artificial Sequence
  Synthetic
REIEKLIRDYRRILRELSEKIRRLAEEHEDIVRKLIETLKRLIDEIRKIMEDLSRLLRRD

SEQ ID NO: 18890 - protein, 59 aa, Artificial Sequence
  Synthetic
KKLMDELRRVSEEVNTRLEKLLRDLEKKLRDSEERAKELIRRIEKTLEDIDRRLKEEEK

SEQ ID NO: 18891 - protein, 61 aa, Artificial Sequence
  Synthetic
RELEKLMEDAERYAKRSMEAFEDLIRKHDELLKRLEKKLRDLIKRIEKLLREIKEKIERTG

SEQ ID NO: 18892 - protein, 59 aa, Artificial Sequence
  Synthetic
EELLKRAKELIETIEERSKRVVDENKRVVERSRRRLKKLLEDIERVLERIERRLTEAKK

SEQ ID NO: 18893 - protein, 61 aa, Artificial Sequence
  Synthetic
SELEKLLEDIERYVKRSKEKARELIKRHKEYVRRSEERLRRLIEKLEKLAEKLKELIRRTG

SEQ ID NO: 18894 - protein, 59 aa, Artificial Sequence
  Synthetic
DSLLKEVEDLLRKVEEESRRVIEENKRVVEESRKRSERLLREIEKELRRVEKEFRDEKR

SEQ ID NO: 18895 - protein, 61 aa, Artificial Sequence
  Synthetic
SELEDLMRDVKRYADESARRIEEIIKRHRKLVREISKKIEELIRELRKLIERILELIRRDG

SEQ ID NO: 18896 - protein, 59 aa, Artificial Sequence
  Synthetic
EELLDRARKLIREIEERSKELSKRNKEEVDRSEERIRRLLKRAEEELRRVREELKEASR

SEQ ID NO: 18897 - protein, 56 aa, Artificial Sequence
  Synthetic
SREEEIRELLKRSKESLEKLLRELDKEHKESEKSARELLKRNEKRLREIREEIRRL

SEQ ID NO: 18898 - protein, 59 aa, Artificial Sequence
  Synthetic
EEVMKRLLKEIRDVNKEITERLEEHRKRLEEINRDVERIIRELNEEHKEVLKRIREKAK

SEQ ID NO: 18899 - protein, 60 aa, Artificial Sequence
  Synthetic
SEREELRKLLRRIEEEAKRLLEELKRTTDDTRRENEELLRRLEELSKETKKRVEDLLREL

SEQ ID NO: 18900 - protein, 56 aa, Artificial Sequence
  Synthetic
VKDVLKKLEDVLRELKKAVEKIKRDNKRAVDENRELVERIMKENKDAMKKLEEDVR

SEQ ID NO: 18901 - protein, 60 aa, Artificial Sequence
  Synthetic
SEREELRDLLRRIKEDAERLLKEHRDLLEEVRKEVEKLLRELRKLSKETEDEAERLLREL

SEQ ID NO: 18902 - protein, 56 aa, Artificial Sequence
  Synthetic
IKDVLKKLKEVLKKLRDDVEKSKRDTKRVLDRLRDTVRKIMEENRRALKEIADEVK

SEQ ID NO: 18903 - protein, 60 aa, Artificial Sequence
  Synthetic
DDEERLREEVERVERTVRDLLRRLRELTKKTDEDNRKLLKEHEDLLREVVKRVTDLLKDL

SEQ ID NO: 18904 - protein, 56 aa, Artificial Sequence
  Synthetic
VKDVLKEIKEVLREVTERAKEIADDNRRALEENEREVKRSKEDTKRALRKLEEEVK

SEQ ID NO: 18905 - protein, 56 aa, Artificial Sequence
  Synthetic
SSSEELEKLLEEVRRELRRLAEEVKRLNEEIDKDIDRLAEENDRLHKEVKKDLDRL

SEQ ID NO: 18906 - protein, 59 aa, Artificial Sequence
  Synthetic
EEVVKRILDEIRRTLEEIKEIARRYLEKNKKEMREIRETMKRDNDHLEDLLRKIRETAR

SEQ ID NO: 18907 - protein, 56 aa, Artificial Sequence
  Synthetic
SDEERIRKKLREIEERHKKLSEELKELLRRSEESVRRLLEKNRKDLDEVRKRIEDL

SEQ ID NO: 18908 - protein, 55 aa, Artificial Sequence
  Synthetic
EEVERRLDRLLDESRRLAEELKERIKRVNKRARELVRESEEHLRELLEKVERDAT

SEQ ID NO: 18909 - protein, 56 aa, Artificial Sequence
  Synthetic
SDKDELKTRLDRVREIIERLARESEELHKELKKRLEDLKRDSERLHRKNLEDIRRS

SEQ ID NO: 18910 - protein, 58 aa, Artificial Sequence
  Synthetic
EVTDRIREDIKRVIEEVRRLAEEDKESVKEILKKIEKLADEDRRSVEKNHKEVEDTRR

SEQ ID NO: 18911 - protein, 58 aa, Artificial Sequence
  Synthetic
RDEERAEELLKEIKDTVDELKKEVEKVLDESRKRDKKLNDELRKLLEDSRRTIERDVR

SEQ ID NO: 18912 - protein, 55 aa, Artificial Sequence
  Synthetic
DKLLEELRKILEELRKKVKDLIEEHRRLVKTSADRVKRLLDEHRRILKELKDRRK

SEQ ID NO: 18913 - protein, 61 aa, Artificial Sequence
  Synthetic
DEAEELIKRIEDLLRELARRMEEILRRHEEYVKKSAEDVKRLLEEVEKLADDLRREVERDG

SEQ ID NO: 18914 - protein, 59 aa, Artificial Sequence
  Synthetic
EEVARKIEEVLRRVKEELTKLVEENERKLRESRERSKKLAKEVEDLLREIKRRVEELER

SEQ ID NO: 18915 - protein, 56 aa, Artificial Sequence
  Synthetic
SERETLEELLERVERLLEKLKRELDEAHKKNKEDLDRLRDKNRKRLEDIKRTIDRI

SEQ ID NO: 18916 - protein, 55 aa, Artificial Sequence
  Synthetic
EELLKELKEVLERIRKEVEKLLRTLEEINKTTRKLVEETNEKADRILEKVKRDAK

SEQ ID NO: 18917 - protein, 56 aa, Artificial Sequence
  Synthetic
SEDEKMEELIKRSEDKLRKLEEDVRRLLEEIRRRAEDNTRRNERTLREIERTLREI

SEQ ID NO: 18918 - protein, 55 aa, Artificial Sequence
  Synthetic
EELVRELEKIDRETTEVVKKLLEELKDIMRRVHERSEESLREAKKILREVEERAR

SEQ ID NO: 18919 - protein, 60 aa, Artificial Sequence
  Synthetic
SEEEELDKLLKEVREKDERLKREVEELLRRIKKRLEELKRENDELLKEVREVLKKLAKET

SEQ ID NO: 18920 - protein, 56 aa, Artificial Sequence
  Synthetic
VEDVLRRIEEVARRIERLYEELLKKLRDVVREIEKRVREHNEDVKRVVREIEKRIK

SEQ ID NO: 18921 - protein, 56 aa, Artificial Sequence
  Synthetic
DEVEKVKEEIKRLNEDVRRLVEEYRKRLEKLNRDHRDYVKKSEKRIRDLIREVRRR

SEQ ID NO: 18922 - protein, 59 aa, Artificial Sequence
  Synthetic
EDATREIDKALEDHRESVERLVRELERLNEENRKSVKKSEEDSRRLLEEVRRELRRKRK

SEQ ID NO: 18923 - protein, 58 aa, Artificial Sequence
  Synthetic
DEEERVEELLRRDRESDKELRERLRKLNEENRDETEKLIRELEDSLRRLKEELEKKGK

SEQ ID NO: 18924 - protein, 55 aa, Artificial Sequence
  Synthetic
KELEKELRDNNRRLEEVIRRLEEELKRISEELRKVIKKLKRDNEEKLRRLDEATR

SEQ ID NO: 18925 - protein, 60 aa, Artificial Sequence
  Synthetic
DEEERVKDINRRNEEDSRRLERRIRELNRENRKSSKELADRVRELLKRAEERLRTEGKDK

SEQ ID NO: 18926 - protein, 55 aa, Artificial Sequence
  Synthetic
EELVKKLEDINRRLREAIKRLEDTIREINKELRKKIKELLDRLKEIVKRLEDRAR

SEQ ID NO: 18927 - protein, 58 aa, Artificial Sequence
  Synthetic
SAEERIKRINKKNRDDSEKLKRRIEESNRENKRSSDELVKRLEELLRKLEEDLKRKGK

SEQ ID NO: 18928 - protein, 55 aa, Artificial Sequence
  Synthetic
KELEKKLRKINEDLKRAIRKLEEDNKRANEELKKRAEDLLREIEEIIRRLEERTR

SEQ ID NO: 18929 - protein, 58 aa, Artificial Sequence
  Synthetic
DEERRAEEINRRNKKDSDRLAETIEKILKEDEDRDKELHDRLEEILKELRKRLEEEGK

SEQ ID NO: 18930 - protein, 55 aa, Artificial Sequence
  Synthetic
EELVKELEKINEELRRDIKRLIDEIRENTERLERMIRELEKKIRKILKELDDRAK

SEQ ID NO: 18931 - protein, 55 aa, Artificial Sequence
  Synthetic
DLEKELTDLMKKHAEENDRLRRRLEELLKRHAEENDRLRDRVRRINEEVEEILRR

SEQ ID NO: 18932 - protein, 59 aa, Artificial Sequence
  Synthetic
EDVIREALERIKRISDESKRTIDEVVKEIEKITKESRDLITKYERDVERSIEEAERRAT

SEQ ID NO: 18933 - protein, 60 aa, Artificial Sequence
  Synthetic
SLEERIRELLKRHEDLTRKLKKENDESLRRHRELTKKLRKELEELLKRAEDVLRDLEREG

SEQ ID NO: 18934 - protein, 59 aa, Artificial Sequence
  Synthetic
AREVDDLLRKIEDISKKSADRNRELNEELEDISRRSKEEMKKLLDELRRDVEEIKKRTK

SEQ ID NO: 18935 - protein, 60 aa, Artificial Sequence
  Synthetic
DLEDRIRRLLEESKKNLDELKRRNEESLKRSEDLLKDLKRKLDDLLRKAEEVLRELRKRG

SEQ ID NO: 18936 - protein, 59 aa, Artificial Sequence
  Synthetic
ARDVDRLLEDVKRISDTVHKRNEELNRRLREISERAREAVEDLLRRLEEIVRRIKTRTE

SEQ ID NO: 18937 - protein, 60 aa, Artificial Sequence
  Synthetic
EEIERILEKLRRDLEEVRKKVKKVLDELRELTEELKRKVEKVLRELKRLSEEIARRVEKG

SEQ ID NO: 18938 - protein, 55 aa, Artificial Sequence
  Synthetic
RELRTVAREIREELKKLREELDKLLREHRETSKELEKRLKEVLDRHRELSDRLRR

SEQ ID NO: 18939 - protein, 59 aa, Artificial Sequence
  Synthetic
DELREMIRKVREINERSKDEIRKILEAIKKIVEDHRRVVEKLLRDLKDIVRRARETRSR

SEQ ID NO: 18940 - protein, 59 aa, Artificial Sequence
  Synthetic
EEARKRLEDLSRENKRSLDELRKRIDDILDENRRAVEESRERAKRVLDEVRETLKRDEK

SEQ ID NO: 18941 - protein, 60 aa, Artificial Sequence
  Synthetic
SEVDEVEKRIREAIKRHRDRVKKIIDEIKKLLDDHRRRVKKLEDDLKKRADDVRKETKDG

SEQ ID NO: 18942 - protein, 59 aa, Artificial Sequence
  Synthetic
KEARDRIRELLKKYEDDLRRSEKEIEDILRRYERELRESEKRMREVLKRLEDELRRAEK

SEQ ID NO: 18943 - protein, 60 aa, Artificial Sequence
  Synthetic
DEVKEVEKKIRKVLREHKKLVEELIRKIKEMIDRHKEIVERIIRTIRRELKRAEELARKG

SEQ ID NO: 18944 - protein, 59 aa, Artificial Sequence
  Synthetic
EEMEKRIEDLLREYREELERSRRELERLLEEYEKVVDESRKRIKTILDEVEKLLRDLDR

SEQ ID NO: 18945 - protein, 56 aa, Artificial Sequence
  Synthetic
SSRERFKELSDRNKEVVERSRRRLEKLLEENKREVEKSKKRIEDMLRKADDLLRKL

SEQ ID NO: 18946 - protein, 55 aa, Artificial Sequence
  Synthetic
ERLSEEIKRLIETHEKLLRELEKKIRDLIRKHREDVERIIKEIDKLLKKIDEDTR

SEQ ID NO: 18947 - protein, 57 aa, Artificial Sequence
  Synthetic
SEEETLDELNRENEELLRRSKERLDRSHEKLKKILDDISERVKELLKRAEKLLRDEN

SEQ ID NO: 18948 - protein, 56 aa, Artificial Sequence
  Synthetic
KDRVSDRIRRLLEEHERVVRELLESNDRMAERLRRVAEELVKEIKKELDDLRRRTT

SEQ ID NO: 18949 - protein, 56 aa, Artificial Sequence
  Synthetic
SEEETLERLLRKNEEELKKSKERLKELNRTNRKELRDSERRIKRALEEVEDLIRRE

SEQ ID NO: 18950 - protein, 56 aa, Artificial Sequence
  Synthetic
KDEVTKTIERIIEEHRRMIEELIKEIRKLIKEHRDKVRELLKRIKDILRRLKEERR

SEQ ID NO: 18951 - protein, 61 aa, Artificial Sequence
  Synthetic
SLDERIDELRRTLEEMLDRIRRSNEEVLRDSRRVLEEIDERARRVVEEAEKLLREIDKRKG

SEQ ID NO: 18952 - protein, 59 aa, Artificial Sequence
  Synthetic
EEDIKRLLEKVREIIEELKRRNDELNKRIKDLSEEMRRRVKKLLDEIKEDLERIKRRAD

SEQ ID NO: 18953 - protein, 61 aa, Artificial Sequence
  Synthetic
SLEEEIKELIKRAEEVLERLARSNKEVLDRSRKVLKELRETNKRLLEELKRALDKIRKDKG

SEQ ID NO: 18954 - protein, 59 aa, Artificial Sequence
  Synthetic
EEDIKRLLEEVERIIRKLAEENKKLNKEIEDLSRRARERNERLLREVEKIIRDIRERAR

SEQ ID NO: 18955 - protein, 58 aa, Artificial Sequence
  Synthetic
SEVEELTKKAKKIIEDHRRYVEKSARDVERLIREHERYVEESAKKVEKLLREIKELDK

SEQ ID NO: 18956 - protein, 56 aa, Artificial Sequence
  Synthetic
KDKIRELERENEEVIKESRERSERLARKNKKVLEDSERRSRELSERVERLLDESRR

SEQ ID NO: 18957 - protein, 56 aa, Artificial Sequence
  Synthetic
REEDVLRKLEKEIRDLLERIKRKSEELIERNKRTNDDIRRRSKETIDELRELTKRV

SEQ ID NO: 18958 - protein, 56 aa, Artificial Sequence
  Synthetic
DEDIRREAERLLREMEKRAKENEEDVRRNLKRLRDALKEHKEKVEKLLEEIKKDAK

SEQ ID NO: 18959 - protein, 56 aa, Artificial Sequence
  Synthetic
SETDDIIRRIRRLIEELLRNSKRTSDDNRRTLEELERNSERAIKKIKDVLEKLSRD

SEQ ID NO: 18960 - protein, 55 aa, Artificial Sequence
  Synthetic
EKAEKIRKELEDMARESRKLMRENKREVDRVEKKSRKLLKDILDEIDKVDEDEKR

SEQ ID NO: 18961 - protein, 57 aa, Artificial Sequence
  Synthetic
SEAERIAREVERVLREIEEEVKRLSEENRELVERIERESRKSIEDIERRLEEVKRKV

SEQ ID NO: 18962 - protein, 56 aa, Artificial Sequence
  Synthetic
RRLLEALRREVEEVLKRIRETLEENRRRNEEVLRRDKELLERIRDKIRRVLEELKR

SEQ ID NO: 18963 - protein, 60 aa, Artificial Sequence
  Synthetic
DEERELRKLERELEDVVRKDRKILEDLRRTLDTVRREDERILRELEETLKEVVKRVREKG

SEQ ID NO: 18964 - protein, 56 aa, Artificial Sequence
  Synthetic
IRRISEEAKELLKRWEDESRKVEEEHRRSLEEWRERSERIAREHKKSLEKLEKDVE

SEQ ID NO: 18965 - protein, 56 aa, Artificial Sequence
  Synthetic
SIEELLKKLEEDIERVLRKSEELLKRNEEENKKVLDESKRLLDELKKRAEKVLREL

SEQ ID NO: 18966 - protein, 59 aa, Artificial Sequence
  Synthetic
EEVLKEIVKRVRDDIERHDRESKKLSDENKRVVDEHRKRSEELARKLEELLREIRERVT

SEQ ID NO: 18967 - protein, 59 aa, Artificial Sequence
  Synthetic
SDIEKLAEEVDRLNKELTDRLERLREEHKRTLDEIRKTLEKLKREVDKELEEVKKIVKD

SEQ ID NO: 18968 - protein, 59 aa, Artificial Sequence
  Synthetic
ERVKKILDDLKRKNEENDERVERIMRELRERNRKLNEEIDKIVEDIRREVEKVSREARR

SEQ ID NO: 18969 - protein, 59 aa, Artificial Sequence
  Synthetic
DAVDRVREENKKDSERNKKRVEDVKRRAEERSRRNKKKVKELRDRNREEIKRIKELKDR

SEQ ID NO: 18970 - protein, 56 aa, Artificial Sequence
  Synthetic
RKVEEESRRSFKRNKEENKKVRDEIKKTIEENEAENRKAHEDSKRSFEELEDELRK

SEQ ID NO: 18971 - protein, 60 aa, Artificial Sequence
  Synthetic
DKEREATRRLRELEKENTKLVKEIRDADREIEKRLREIHKKLEDENRKLEEEIKDMVRRK

SEQ ID NO: 18972 - protein, 54 aa, Artificial Sequence
  Synthetic
RIVEEVKKHHERNERRLREYLDESRKYLEDHIRRLEKYLEDSRRLATRIKEETK

SEQ ID NO: 18973 - protein, 57 aa, Artificial Sequence
  Synthetic
SSVEEVKRKNEKSLREIERASEEHLERLKRELEKSEDEARKHNKKLDDDLERLERKG

SEQ ID NO: 18974 - protein, 58 aa, Artificial Sequence
  Synthetic
ERVKDLERTHEESKRRVEELMKENDDLLKRIEEESKRLNEENERKVEDIEKKVEDLKR

SEQ ID NO: 18975 - protein, 59 aa, Artificial Sequence
  Synthetic
SEIERVAKELKDEADRLRKEVEKHRRRSKEELDRLREESKKVNEDLKRMLERIREIAAQ

SEQ ID NO: 18976 - protein, 58 aa, Artificial Sequence
  Synthetic
EEFKKLRDLIEDIKRRLEELVKALEETNKKIEDDVRDSVRKNRETLERIKKEIEDTAT

SEQ ID NO: 18977 - protein, 61 aa, Artificial Sequence
  Synthetic
KDVERILREIRETLRRVEEEAKRSNDEIRKLNEEAERIVREILKEIEKELREVRKRLTEKG

SEQ ID NO: 18978 - protein, 59 aa, Artificial Sequence
  Synthetic
DELLRRLKEELDRVERTIRELIRRNEEVLERSDESVEKLLRELEELLRRVEEEIKKAAT

SEQ ID NO: 18979 - protein, 60 aa, Artificial Sequence
  Synthetic
SEREERAKRLRKILEDLKRESEEHLRRLKTRLDKLREDSKKHLEDVRRKLEDLKRIVEEN

SEQ ID NO: 18980 - protein, 55 aa, Artificial Sequence
  Synthetic
DELRKLVRKVEEDLKRLDEENKKLLEKVKRDLDRLKKENKDLLKRVEEELRREAT

SEQ ID NO: 18981 - protein, 60 aa, Artificial Sequence
  Synthetic
SEEEERKRRLEEKLERLEEKSRRHLKEVKRTLEELEERSRRHLDENRRLLKRLKEIVDRN

SEQ ID NO: 18982 - protein, 55 aa, Artificial Sequence
  Synthetic
EEIKKLVKDIKEELKRLLEENKRLLEEAKKTLKKLLEDNRRLIEKIKKELDEARK

SEQ ID NO: 18983 - protein, 60 aa, Artificial Sequence
  Synthetic
REEERLKRELEKDLERIKKLSDEHKKRLEEENRDLRRKSREHKEKLERDLRRVEEIRRRE

SEQ ID NO: 18984 - protein, 55 aa, Artificial Sequence
  Synthetic
DEVERLLKEIEDRVRKLEKENEEIARRSTETLEKLLKENRETLKEIRDRVREAKR

SEQ ID NO: 18985 - protein, 60 aa, Artificial Sequence
  Synthetic
SEEEELKRRLKEILRELKELSERHKKRLRELNEKLKRLSEEHKRKLEEITEDLRRIATRE

SEQ ID NO: 18986 - protein, 55 aa, Artificial Sequence
  Synthetic
EEVKRLLDEIRRELERLKEENRKIVEDSTRTLKELLEENKRILEESSRDLERLKR

SEQ ID NO: 18987 - protein, 60 aa, Artificial Sequence
  Synthetic
SEEEKIKEEIKRDLEDLRRLSKEHKDRLRKLLEDIKKLSEEHKDKLRRITKELRDVVRRE

SEQ ID NO: 18988 - protein, 55 aa, Artificial Sequence
  Synthetic
EEVKRLLEKVKEDLKRLLDENKRIIERIEREVERLKRENEEILKESSRDLERAKK

SEQ ID NO: 18989 - protein, 60 aa, Artificial Sequence
  Synthetic
SKEEKLKEDLKRTLDDARRLAEETKRRLEEILEKLKRLSEKSKEDVKRTTDELRDIVRKR

SEQ ID NO: 18990 - protein, 55 aa, Artificial Sequence
  Synthetic
EEIKDLLRRIREELKRLKDELRRIIEEIRKELERLKRENEELNRRSSEELKKAKK

SEQ ID NO: 18991 - protein, 57 aa, Artificial Sequence
  Synthetic
SEVEELLERHKRALDKAKKVSEDHKRDLKEKLDDVKRKVEELERRLKRALDELTKEG

SEQ ID NO: 18992 - protein, 59 aa, Artificial Sequence
  Synthetic
EDLVRTLDELHKDIERRLRKLEEENRDILRRIREEIERLKRKLDEIARRIKEEVKKLKK

SEQ ID NO: 18993 - protein, 57 aa, Artificial Sequence
  Synthetic
SEVEELKKEHKKVLDEVRRASKKHKEELEEMLRDLKRKADELARRLEDALRRLEEEG

SEQ ID NO: 18994 - protein, 59 aa, Artificial Sequence
  Synthetic
KKAVDELRELHKEIKRRIEKLLKENEEILRKIEEDIERLLEDLRRKAEEIKRRVDETRR

SEQ ID NO: 18995 - protein, 57 aa, Artificial Sequence
  Synthetic
SEVEEIEKENKDAVRRMREKSRRHKEELKDALREAEEISRRHKEELKRKLEELTKRG

SEQ ID NO: 18996 - protein, 59 aa, Artificial Sequence
  Synthetic
EELVRKLRRLDKRTHEDVRRLLDENRRTLEKIEEDIRRLIKENEDTLREIEKRVEDKKR

SEQ ID NO: 18997 - protein, 59 aa, Artificial Sequence
  Synthetic
SEDEELKKEIEKLLRELRKRSTESKKEIEDLLDELRRKSERSRKEIEDTLRELEERAKG

SEQ ID NO: 18998 - protein, 55 aa, Artificial Sequence
  Synthetic
EEIKELLERLRRDAERLKKENEDLNRRLREEVEKNKEDNKRLNEELRKKVEEDRR

SEQ ID NO: 18999 - protein, 61 aa, Artificial Sequence
  Synthetic
SLEETLDKILEDIRRRIRENEERNRRLKEEIDKAIKRNEEENRKTNEDIKRKIDDLERKRG

SEQ ID NO: 19000 - protein, 59 aa, Artificial Sequence
  Synthetic
KKEVEELIRELEDELRKLEERSKEHLDRLREELKELDERSKKHLDELRKLEEKLRRDAD

SEQ ID NO: 19001 - protein, 60 aa, Artificial Sequence
  Synthetic
SETEKLLERIRRNVEENEKYAREHLKKLDKNLKDNKEYIDRHVKKLKERLDTLREIAREK

SEQ ID NO: 19002 - protein, 55 aa, Artificial Sequence
  Synthetic
ERIEKLLRELERTHRELKEELDKLHKRLEEEHRRLEKKLRDIHRKVEKDLRDLKR

SEQ ID NO: 19003 - protein, 60 aa, Artificial Sequence
  Synthetic
EEKERLKKRIRDNVEENKKYAEEHLKRLKEKLEEVRKYIEDHKDRLRRKIEELKKDAERK

SEQ ID NO: 19004 - protein, 55 aa, Artificial Sequence
  Synthetic
EEIRRILEELRRTHKKLEEELEELHKRVEDELRRLEDELREIHERLEETLRRLRK

SEQ ID NO: 19005 - protein, 60 aa, Artificial Sequence
  Synthetic
SEKEKLKEEIKRNVEENRRYVEEHKRDLERNAEENEKYIREHLKRLKEEAEEVRDRVAKE

SEQ ID NO: 19006 - protein, 55 aa, Artificial Sequence
  Synthetic
KEIERLLRELERTHRELRKDLKRIHDELKKKHDDLRRTLEEVHKRVKEELDRARR

SEQ ID NO: 19007 - protein, 60 aa, Artificial Sequence
  Synthetic
SEKEELIERIRRNLEENRRYIERHLEELEKKLDDVRRKAKRHLEKLREELEKLKDDARKK

SEQ ID NO: 19008 - protein, 55 aa, Artificial Sequence
  Synthetic
EEIRKLLEELRKTHEKLKRDLERLHKKVRDTLKKLEDELKELHKRVDDELRKLRK

SEQ ID NO: 19009 - protein, 60 aa, Artificial Sequence
  Synthetic
DEERKLEELEKENDKLLEDAKRTLEKLLKDNRDLVKRVEDELRRLEEENKKLADDVRRDG

SEQ ID NO: 19010 - protein, 56 aa, Artificial Sequence
  Synthetic
SKELEDRSREHLERLKARLKELEDKSRKHLEEVKKELRELEEKSKKHLKRLEDARR

SEQ ID NO: 19011 - protein, 60 aa, Artificial Sequence
  Synthetic
DEEETLKRLDEENDKLLEEVKKTLEDSLRRLEELHKRTEEELRKSRRELRELVKDVERKG

SEQ ID NO: 19012 - protein, 56 aa, Artificial Sequence
  Synthetic
KEELRDKSRRHLEDVKRRLEELKKSNEEALRRDEKKLEDLRRSNEKVLRELKEKAR

SEQ ID NO: 19013 - protein, 60 aa, Artificial Sequence
  Synthetic
SEEEEVRRLEEELKKLHDDIKRRLEELLRENEKILRDIDREIKKLLEELRKTIDKADKDG

SEQ ID NO: 19014 - protein, 56 aa, Artificial Sequence
  Synthetic
KDELRKIVEELKRDHEKDLRKVEKLSEEHKEKLRRALEELKRLAEEVKKRLDDERR

SEQ ID NO: 19015 - protein, 59 aa, Artificial Sequence
  Synthetic
SVEERLEEMERRNKDLIRRVEEDLERLLKENRDLIRRIKEELKRLKEELKELVERISRE

SEQ ID NO: 19016 - protein, 59 aa, Artificial Sequence
  Synthetic
EEVLKELEEENRKHEKRLRDALERLRRRSKKHKDEARKILEELKERAKTIKRRLEEDRR

SEQ ID NO: 19017 - protein, 60 aa, Artificial Sequence
  Synthetic
SVKEDLRKAKEENKRLIEKAEDDLRKLLRENKELLKRIDEELKRLKKELDDIVRRIEDKG

SEQ ID NO: 19018 - protein, 59 aa, Artificial Sequence
  Synthetic
EEVLEKLKRDNEDHKRRLKEDLRRLREESKKHKKKLEDRLKKLEERARRIKEKLKEEER

SEQ ID NO: 19019 - protein, 62 aa, Artificial Sequence
  Synthetic
DDEERIRKIAEDIKRKLKETLERLRDESRKNKRKLEDLLRKSEEKAKRLKDKLRKMEEEKER

SEQ ID NO: 19020 - protein, 55 aa, Artificial Sequence
  Synthetic
EDVKRLLRELKEITDRIDEEVKRLREENERITRRIEEEHKRLNKELERILREIER

SEQ ID NO: 19021 - protein, 57 aa, Artificial Sequence
  Synthetic
SSEEKAKELRKRLRETHKRVKDEIKRLKEELEESHKRLEERSRETLRKLEELIKELN

SEQ ID NO: 19022 - protein, 56 aa, Artificial Sequence
  Synthetic
DTELEKDVRRVEEKNRRALEDVRRKVEEVKESNKRALEKNERIVREVERRLREEKK

SEQ ID NO: 19023 - protein, 57 aa, Artificial Sequence
  Synthetic
SSEERFEKLDRELKRTHEELERAIRELKKDYERSLKRVEEELKRLLDELEELARRVG

SEQ ID NO: 19024 - protein, 56 aa, Artificial Sequence
  Synthetic
DTKVTETVRRVREENKRMLEDVKRDVDRLRTSNEKVLRDIRRTVKRAKERLKELKE

SEQ ID NO: 19025 - protein, 60 aa, Artificial Sequence
  Synthetic
SAEDELRRLRRELEKSHEELKRRIDELLKRLRELVKRVKDRSKELLDELRKLLEDVKRKG

SEQ ID NO: 19026 - protein, 56 aa, Artificial Sequence
  Synthetic
DTRVRERVKETRRRNEEVLREVERIAKEVEDDLKRILEELEDNVRRVKKKIKDVER

SEQ ID NO: 19027 - protein, 60 aa, Artificial Sequence
  Synthetic
SSEEELKKLEKELEETHRKLKEDVERLLRDLDRKVKKVEDDSKKLLDELRKLLEEAKRRG

SEQ ID NO: 19028 - protein, 56 aa, Artificial Sequence
  Synthetic
ERDVRKRVKEMKEDNRRALEDIRRKTEEVAKKLREILKKLRENVRRVAEEIKRVAD

SEQ ID NO: 19029 - protein, 60 aa, Artificial Sequence
  Synthetic
STEEELERLRRELERTHERLREESEKLVRELRKLVEEVREALERLRRDLKRLLKEVREKG

SEQ ID NO: 19030 - protein, 56 aa, Artificial Sequence
  Synthetic
ETEVREEVKRTKEENKRVEEKLRRNVDEMRKKLEEILRRIKEEIDKMRRKIEEIER

SEQ ID NO: 19031 - protein, 60 aa, Artificial Sequence
  Synthetic
DVEEDLKRLEKKNRDLNKRMEDSNRKLEEDDERVNRKIRKDHKKAEDDLRRVIKEVEEEN

SEQ ID NO: 19032 - protein, 55 aa, Artificial Sequence
  Synthetic
EKTIEDIERHLDRLRKENDKLRKELEDHIRRLEEEVRKNLDRIREEIERARERVR

SEQ ID NO: 19033 - protein, 59 aa, Artificial Sequence
  Synthetic
RAEDEVRKIKKEIDELIRRLEKLNEDIKREIDELVRRLEELNKRVKEEIKRLIEELKKE

SEQ ID NO: 19034 - protein, 56 aa, Artificial Sequence
  Synthetic
DRELKERLDRMRDHARKHEEKLKESLKRVREHVKRHAERVEESLRRLKRDVDELRK

SEQ ID NO: 19035 - protein, 57 aa, Artificial Sequence
  Synthetic
SSDEKLEEIERHHRKVEEESRRLDEDIKRHHKEVEDESRELLERIKKKLEDVTRALG

SEQ ID NO: 19036 - protein, 55 aa, Artificial Sequence
  Synthetic
DEILEKLERDNRRYKEESEEEVERAKEENRRYLEESRREVEEFDRKLKEIADRAR

SEQ ID NO: 19037 - protein, 57 aa, Artificial Sequence
  Synthetic
SELEERVKKVEKVNEDLKRRVEEHERRVKRTLERLEEEVRRHAEKVKKRLEELRRLA

SEQ ID NO: 19038 - protein, 59 aa, Artificial Sequence
  Synthetic
ERIEDLLRRLDDRNRETEREIEERHKRLKEELDKVEERIRREHEKLKRELEEVERRTRK

SEQ ID NO: 19039 - protein, 60 aa, Artificial Sequence
  Synthetic
DVVDELRRIAKEVRDRLREIVERLDRIAKEVVKENEEVVRHNDELAKRVVTTAKRIVDEV

SEQ ID NO: 19040 - protein, 58 aa, Artificial Sequence
  Synthetic
EEVKRVVETVRKLLRDAEKEIEEVVKKVRDLLRRVNKELKESVERVRRLLEEVRERAR

SEQ ID NO: 19041 - protein, 61 aa, Artificial Sequence
  Synthetic
SDLDRVLRKIEELVREIEKESERTNRKSERDTEEVARRSEDSDRDIERLVREIRDRLRKAG

SEQ ID NO: 19042 - protein, 59 aa, Artificial Sequence
  Synthetic
KDVVRELEEIVKELEERAKENVKRSEKSVKEDLDVLADNVRRSKEIVEEIKKRADEVVT

SEQ ID NO: 19043 - protein, 57 aa, Artificial Sequence
  Synthetic
SEKEKVIKEARELLERLRKRLKDVNDDVTRLLDELRKENEKSREDVEREVKRLEEEV

SEQ ID NO: 19044 - protein, 56 aa, Artificial Sequence
  Synthetic
AEELKRVADRLRRRLERLVEENERVVKKILDEIRRSVEENKRIVDKVRKDLDERRK

SEQ ID NO: 19045 - protein, 57 aa, Artificial Sequence
  Synthetic
DEDEKVLRKIEELVRRLHEKNRKVLEESKRTLEKVEERLRRVLKEIEDLVRDAARRV

SEQ ID NO: 19046 - protein, 56 aa, Artificial Sequence
  Synthetic
VSELDKIIKELKREADESVKKLKEIVKRSLDHLEEVVKELKKRLDDLKREIDTKAK

SEQ ID NO: 19047 - protein, 59 aa, Artificial Sequence
  Synthetic
SLEEEVKKVVEEIKRRIEDDVRRIRELVERIKKLIEKDVTDLKRVVDENRDLAEKAKRI

SEQ ID NO: 19048 - protein, 55 aa, Artificial Sequence
  Synthetic
EELLRELRRVLEEAREDSRRLLEEIRKVLEEAEEKSRRVLEESKRVNDELRERLR

SEQ ID NO: 19049 - protein, 59 aa, Artificial Sequence
  Synthetic
SLDESAKRVLEEIKRLAKEDLDELKRVLDEIKEILREVLEANRDSVRRIEEEVEKLARV

SEQ ID NO: 19050 - protein, 55 aa, Artificial Sequence
  Synthetic
DRVLEEIERVIRKIEEDSRRLLKEIADVIKKVREESKRLLDDLKRVIDELRERAR

SEQ ID NO: 19051 - protein, 59 aa, Artificial Sequence
  Synthetic
SLEEVLDRVRRESDKVRKTLERVKEEVERVSREVVEDLKRVEEEVRRLIERVKDILRRS

SEQ ID NO: 19052 - protein, 59 aa, Artificial Sequence
  Synthetic
EELIRDVLREAERLVKESLDDIRRLLDEVRRLVEESRRNIERLLEEVRRLVEEIERAAE

SEQ ID NO: 19053 - protein, 60 aa, Artificial Sequence
  Synthetic
DKVDEVLKRVKRVVEEIEDRVRKLNKEVRDVVKRIEELAREVLDHSRKVVEEIKKTAEDR

SEQ ID NO: 19054 - protein, 56 aa, Artificial Sequence
  Synthetic
EEVVRTVKEELDKALEKAERVLEHSRRMLERVLKEAKRVLDEVKELNKRVIDEVRR

SEQ ID NO: 19055 - protein, 56 aa, Artificial Sequence
  Synthetic
SVEDVAREVDKLLKRANEESKRVLEEVERLLRTVSRELEKVIRDVKKLIDDVEKRV

SEQ ID NO: 19056 - protein, 59 aa, Artificial Sequence
  Synthetic
SETAEKVLRDVERIVRRNEELVREVLRRVKKIVDENRKIAEDALRKVEELVKELEERAR

SEQ ID NO: 19057 - protein, 59 aa, Artificial Sequence
  Synthetic
SEAEEALERVKELVKRSEELAEESLRRARKSVEEVARRAEEALERVKKSVEEVKEVRKE

SEQ ID NO: 19058 - protein, 56 aa, Artificial Sequence
  Synthetic
KEVLDKVRDLVRRVDEENRRVIEEAKKLSEDVARRVDKVIKDVERLSKRVEDEVRR

SEQ ID NO: 19059 - protein, 58 aa, Artificial Sequence
  Synthetic
DEDRRAVEELRRVVEEVNKLNEDTLRELERIVRENIRRVRELLKEAEDVVREVEKEVR

SEQ ID NO: 19060 - protein, 55 aa, Artificial Sequence
  Synthetic
EEVLREAKDLIDHVRKTIEEVNDTVRDLVRKVHEVNKEVLDRIRKLVEEVRKTVE

SEQ ID NO: 19061 - protein, 61 aa, Artificial Sequence
  Synthetic
SSLDRVRRAIEELVKKVNTDSKRVKDRVRKLLKEVNDTSDRVRRDVKRKLDKVKDDARKAG

SEQ ID NO: 19062 - protein, 59 aa, Artificial Sequence
  Synthetic
DRVVERVVREVERIVRENEELVKEVVRRAEEIVERNERHSRELLRRLAELVDDLRRKIE

SEQ ID NO: 19063 - protein, 61 aa, Artificial Sequence
  Synthetic
SSLDEVRKRVTELLKKVDDTSKKVEDDVKRLLDKSTRTSDEVRKAAERLLEEVEESARRKG

SEQ ID NO: 19064 - protein, 59 aa, Artificial Sequence
  Synthetic
DEMVKRVLEELKKIVDDLERHSRKLLKDARRIVEESIEHSDRVLKEATRIVEKLERDIR

SEQ ID NO: 19065 - protein, 59 aa, Artificial Sequence
  Synthetic
DEIEEVLREMRELVERNVREIEKVVRENEKLVEDNIRLVREVAKELRDLVRKLIERVAR

SEQ ID NO: 19066 - protein, 58 aa, Artificial Sequence
  Synthetic
EELEEVVKEARRLLKKSEEDLRRVEKRVEELNEKSKEEMERVRDDVRRLLEEVKERAR

SEQ ID NO: 19067 - protein, 60 aa, Artificial Sequence
  Synthetic
SEVDELLRLADEIVRELRELVRRHDEIVDKLVEENRRIVEEHLRRVEDVVRRLKELVKKI

SEQ ID NO: 19068 - protein, 58 aa, Artificial Sequence
  Synthetic
EEAERVVKEARRLLREIEELVKRSVERVERLHREVHERIKESTKRVEELVDEVRKAVK

SEQ ID NO: 19069 - protein, 60 aa, Artificial Sequence
  Synthetic
SAVDEVRKVIKEIFDRLAELLKHNSDMVRRLLEEIRELVKNNTEIVREVLKKLEDILREL

SEQ ID NO: 19070 - protein, 59 aa, Artificial Sequence
  Synthetic
EEKLEKVAEDARRAIKDIEDKLRDSNRRLDKLIKEVRRRLEESHKRIEREIKEIEERVR

SEQ ID NO: 19071 - protein, 61 aa, Artificial Sequence
  Synthetic
DKLDEVKEAARRVVEEAHKKNRRVLEKLDEVSRRAHELDKRVKEKLKEVVKRADDLLKEKG

SEQ ID NO: 19072 - protein, 60 aa, Artificial Sequence
  Synthetic
VDTLVERLRRLVEELRKHSDDTVRRMEDIVRRNKKHSEESVRKMDDIVKKLEELAREVVR

SEQ ID NO: 19073 - protein, 61 aa, Artificial Sequence
  Synthetic
DRLDKVKEDLKRSSEDAHRKNKEAIELLDEVSTEAHKLDEDVRRKLEKVVREVRKLLEDKG

SEQ ID NO: 19074 - protein, 60 aa, Artificial Sequence
  Synthetic
IDTIVRDAEKIVEDNRRHSDETVRRIERLVTENLRHSEESVRTLDRLVEELLRTAEEVVR

SEQ ID NO: 19075 - protein, 61 aa, Artificial Sequence
  Synthetic
DKLERVLRELERSSKEAHEKDKKVLEDLDEVSKRAHKANEEVIARLEDVVRKAEDELRKKG

SEQ ID NO: 19076 - protein, 60 aa, Artificial Sequence
  Synthetic
LDTLVKRIEDIVKENEDHSRRSVEEIRRIVEENERHSRESVKTIKDLVEELERRAEEVVR

SEQ ID NO: 19077 - protein, 61 aa, Artificial Sequence
  Synthetic
SELEKVLKDLEESSKEAHKADEEVLRRLERVSREAEKELKRVLDDLRRVVEEVERLLREKG

SEQ ID NO: 19078 - protein, 60 aa, Artificial Sequence
  Synthetic
LETLVRDARRIVKENEEHSRDSVRRIDKIVKENADEVRRVVKEIKDIVKRLEELARETVR

SEQ ID NO: 19079 - protein, 56 aa, Artificial Sequence
  Synthetic
SLDEDVDELVKRVEEEMRRNVKELDKLVKEDKRLAEENVRRLEEIVDRSRKLADRK

SEQ ID NO: 19080 - protein, 55 aa, Artificial Sequence
  Synthetic
EEVLKRLREVIERARRDSERVLRKLEKTTDKVRRDSERVLRENEKSIEDVARKMT

SEQ ID NO: 19081 - protein, 61 aa, Artificial Sequence
  Synthetic
DELERLLEELKRTTRKIEEELKEVNRRLDDTTREAEKELRRLKEKLEEVVKRAEELLRRRG

SEQ ID NO: 19082 - protein, 60 aa, Artificial Sequence
  Synthetic
EKDVVKRLEDLVRDDDRIAKEDVKRLEDLVREDRTLVKEIVDRLEELVRTVEKLVKEVVN

SEQ ID NO: 19083 - protein, 56 aa, Artificial Sequence
  Synthetic
SAIEKVKEVVERVLETVRDSVRRSHEESKRLIDKVRKRLEEVREEVKELIERVRRK

SEQ ID NO: 19084 - protein, 59 aa, Artificial Sequence
  Synthetic
KDAVEDVLRRIEELIRDLNKKNDDNVRRVKEVIDRAEKLVRDLLREIRKLIEKLIRDTE

SEQ ID NO: 19085 - protein, 57 aa, Artificial Sequence
  Synthetic
SVLEEVRRRVEELLKTVKESVDRSHERSERLIEEVRESLKEVKRRVKELVERVREKG

SEQ ID NO: 19086 - protein, 59 aa, Artificial Sequence
  Synthetic
DKVARDVLEEIERLIREANERNKRNLEDVERVIRELNKENERVLREVEKKIEKLIRETE

SEQ ID NO: 19087 - protein, 57 aa, Artificial Sequence
  Synthetic
SSIERVEKEVRRLLRESDESLKRVMEEAKELIKSVRESTKRVEEDARDLLRKVVERT

SEQ ID NO: 19088 - protein, 59 aa, Artificial Sequence
  Synthetic
EEEVERVLEEVRRIIEKLKEDDKRSLERIERIVRRNNELNKESVDRIRKIIKEMEERAD

SEQ ID NO: 19089 - protein, 57 aa, Artificial Sequence
  Synthetic
DESEDVEEKMRRLLEKSKDETRRVKEEVERLNEESKRVTEEVEKRVRDLLREVREKV

SEQ ID NO: 19090 - protein, 56 aa, Artificial Sequence
  Synthetic
VETVLREAKRLIEESIERIERVLKENRELAERSIKVLRDVLREVEDLIRKLEERAK

SEQ ID NO: 19091 - protein, 56 aa, Artificial Sequence
  Synthetic
RKVEEVKKEAERLLRRSEEVSKKVADDADRLLKRSREVSDRVRRESERLLKEVAEA

SEQ ID NO: 19092 - protein, 59 aa, Artificial Sequence
  Synthetic
DKRVEDVLREARDLVRRSIKKIDEVLKEAKRLVEESIKLSEDNVRRNEEIIRDLERRTR

SEQ ID NO: 19093 - protein, 56 aa, Artificial Sequence
  Synthetic
SAVERVKEEVDRLLERSKKESERVRKESEDLIRESDEVSRKVEEDSRRLIEEVERS

SEQ ID NO: 19094 - protein, 59 aa, Artificial Sequence
  Synthetic
ERVVTRLLEEAKRLVERSIEEIKRNVKENRKLVEESIKLSEENVKRNKRLVDEAIRAAE

SEQ ID NO: 19095 - protein, 61 aa, Artificial Sequence
  Synthetic
SVVEEVVERVKRIAEELKRSSEENVDTVRKVVAEAKKLVEDDVREVEKLARRLKEVVTRDI

SEQ ID NO: 19096 - protein, 59 aa, Artificial Sequence
  Synthetic
ERVLKDVKDKADKLIREVEETSKRSEEDVRKVIEEVREVLRESHERVKELIKEVREAER

SEQ ID NO: 19097 - protein, 60 aa, Artificial Sequence
  Synthetic
SEAEKVAEDARKLAEEVIRLIEEVVERSKELVDRNEKEIRRVIEESDKLVEEVIRLLRRG

SEQ ID NO: 19098 - protein, 58 aa, Artificial Sequence
  Synthetic
ESVREVEKIVRDVVREIREMLKRSKDETRRVIKRVREVNDRSEKRSRDVVREARETSR

SEQ ID NO: 19099 - protein, 60 aa, Artificial Sequence
  Synthetic
SEAEEVARRARKLVRELEELIRKSVEDSRELVKRNIEKIKRNVRKSEEDVDRVIKLLRRG

SEQ ID NO: 19100 - protein, 58 aa, Artificial Sequence
  Synthetic
EAVREVDRIVKEVVRRVREALERSREETRRVIEEAKKANKESDDVSRKVAKEIDEEAT

SEQ ID NO: 19101 - protein, 57 aa, Artificial Sequence
  Synthetic
RVIEEVDKEIKRVIKESEDVTKEVKDTSRKVLEDSKRESERVRRRSEEVLKKVEEEG

SEQ ID NO: 19102 - protein, 59 aa, Artificial Sequence
  Synthetic
EDEVRRVAEKVKRLVDESIKRLKDNVKRNKELVDESIREVERNVEENERLATKVIEEAK

SEQ ID NO: 19103 - protein, 57 aa, Artificial Sequence
  Synthetic
SVIERVEEEMEKVIRDSERVTKEVEDRAREVHERSEKRIREVEETSRRVLEELRRAG

SEQ ID NO: 19104 - protein, 59 aa, Artificial Sequence
  Synthetic
EEEVKKLAEEVRRLVEDSIRKLEELARRVDELVRESIERVDRNVEENKRLVREAIERRR

SEQ ID NO: 19105 - protein, 57 aa, Artificial Sequence
  Synthetic
SVDREVEEIMRRVHKESEDVIRKVKDTVRRVLERSREVSERVKRDAERVLEEVKRAG

SEQ ID NO: 19106 - protein, 59 aa, Artificial Sequence
  Synthetic
KDFLKRVAEEVKRLVEESIKRVEDVAREVERLVEESIRLLEAVAKKVRDLVREVKRRRT

SEQ ID NO: 19107 - protein, 59 aa, Artificial Sequence
  Synthetic
KEIEDLVKKIREIVDRIKKTVEDSVREVRRIVDESAKSVEELVKELKKLAEELRKLVED

SEQ ID NO: 19108 - protein, 58 aa, Artificial Sequence
  Synthetic
ELIRTVERELREVEKEVKKMLDESTEVLKEVEERVRRMNDDVRRVLEKVARDVERDLR

SEQ ID NO: 19109 - protein, 59 aa, Artificial Sequence
  Synthetic
KEVEEVVTKVDDLVRELEERSRRHVERVKEIADRNEKLVREVVKRSRDNVRELEELVRR

SEQ ID NO: 19110 - protein, 59 aa, Artificial Sequence
  Synthetic
REVLEEVKKRIRDVLKRVEDASKRVKETIDEVLKRIKELTEDVERKSREVLRRVKEARK

SEQ ID NO: 19111 - protein, 59 aa, Artificial Sequence
  Synthetic
KEVEDIIRKLRRHVKEIERTIREMVESVKRLADEVVKVLKDALDSARDHVRKILETLRD

SEQ ID NO: 19112 - protein, 59 aa, Artificial Sequence
  Synthetic
EDVLRELRKVIEDTERTIKRLVDELEKVHREVKERIRKIAKDLRDKHKKSKRDIRETER

SEQ ID NO: 19113 - protein, 57 aa, Artificial Sequence
  Synthetic
SAKDEVKDVNDKVRKEVRRVIEESRAVNEEIKRRVDTVLKESEDVNREVKREVEDKV

SEQ ID NO: 19114 - protein, 59 aa, Artificial Sequence
  Synthetic
EKVAKEIVRKSEDVVRRIVEELKEDAKRSRDLVRELVKEIKEDVKRSRELVKRVVEEAK

SEQ ID NO: 19115 - protein, 60 aa, Artificial Sequence
  Synthetic
REAEELVKRNEKIVTDIRRLVEKTVRDSRRVVEELKREAEETVERSRRVVTKLKELVERG

SEQ ID NO: 19116 - protein, 58 aa, Artificial Sequence
  Synthetic
RMVEEVERTSREVEEEVKRVLKKSRDVTREVEEEVRRLLERSRKETDDVRKRLEEAER

SEQ ID NO: 19117 - protein, 60 aa, Artificial Sequence
  Synthetic
DEAERLVEEIKRVVKEAEDLVRRTVEISRRVVETLRKEAEDLVRDSERVVKELTELARRG

SEQ ID NO: 19118 - protein, 58 aa, Artificial Sequence
  Synthetic
ELVEKVRRVIEEVEKRLRDMLRKSRDVTREVKERVARMLEKSKKVTDDVEKRVTDEDR

SEQ ID NO: 19119 - protein, 60 aa, Artificial Sequence
  Synthetic
KEAEDLVRRVEEVVEELERRVEKLVRESEEVVKKLSKEVKESVDTNRDIVRRITELARRG

SEQ ID NO: 19120 - protein, 58 aa, Artificial Sequence
  Synthetic
EKVEEVERVIRRVKKRVEEVLRKSKTTTTDVERRVREMLERSEESTRRVKERADRERT

SEQ ID NO: 19121 - protein, 59 aa, Artificial Sequence
  Synthetic
SEADDVVREIEDLVRRDKELVDEVVKRIKDLVRRDKKLVDEVVKEIKDLVTELEDLARK

SEQ ID NO: 19122 - protein, 59 aa, Artificial Sequence
  Synthetic
EEMLRKLERVVEEVKRRSTEALKRLREVVKEVKETSKRANEELERVVREVKKRLDDATK

SEQ ID NO: 19123 - protein, 59 aa, Artificial Sequence
  Synthetic
DEVREVVKEIRKLVEDDKRRVDKVVEDDRRLAKRDLDLVEDVVRRIEDLVRRVLEEARK

SEQ ID NO: 19124 - protein, 59 aa, Artificial Sequence
  Synthetic
KSVLDELRKVVEEVKERSDRALEEVERSIRESEKESRRANEKLRKVVEEVRKKLEEAER

SEQ ID NO: 19125 - protein, 59 aa, Artificial Sequence
  Synthetic
SEVDKVVKDIRDLVRRDLKRVEDVVRTDRRLAEEDLRRVKEVVEKIEKDVKELDELARK

SEQ ID NO: 19126 - protein, 59 aa, Artificial Sequence
  Synthetic
ESVLKKLKDVVDEVERESREALRKVEESIKESKRRSEKALEELREVVKRVDRLLEEARR

SEQ ID NO: 19127 - protein, 59 aa, Artificial Sequence
  Synthetic
SEVDEVVKEVEDLVRRNEELVEEVVRRVEKVVTDDRRLVEEVVREIRKIVKDVEDLARK

SEQ ID NO: 19128 - protein, 59 aa, Artificial Sequence
  Synthetic
EKVLRKLEKVIREVRERSTRALRKVEEVIRRVREESERALRDLERVVKEVEKRMREAAR

SEQ ID NO: 19129 - protein, 60 aa, Artificial Sequence
  Synthetic
DEVDEIVRRIEKLVTDDLKRVEDLVREVKKLVDEDKRKVDEIVKEIRRLVEEIRKEAERD

SEQ ID NO: 19130 - protein, 59 aa, Artificial Sequence
  Synthetic
EKVKRKLRKVVEEVERRSKKANEELEKKVREVEELSKRVLEKLKKVADEVRKEVKDAKD

SEQ ID NO: 19131 - protein, 60 aa, Artificial Sequence
  Synthetic
DSVERLVETIREIARESLRRAKELVKSNKKLAEDSKRRVDKLVKELKDLVTRVKETLKRK

SEQ ID NO: 19132 - protein, 58 aa, Artificial Sequence
  Synthetic
EVLELIEEVVREVKEVNTTVSKEVEDVVEETRKVNEDVAKLIEKVVREVKRVVDEVRT

SEQ ID NO: 19133 - protein, 60 aa, Artificial Sequence
  Synthetic
SELERLVEEIRRLVREIEERSKKTTEDIKRLAEDIRRRSKEAVDENEDLARKIRKRAEER

SEQ ID NO: 19134 - protein, 55 aa, Artificial Sequence
  Synthetic
REIDKVIEEVRKRLKEVTDSDREVIKEIEEVLREVEERNRRSIEKIRKVLEDVTK

SEQ ID NO: 19135 - protein, 60 aa, Artificial Sequence
  Synthetic
SEVDELVEKIRTTVKRVLEKHKRNTDETRRLVEEILERHTRTSRRIERVVREATDKLRRR

SEQ ID NO: 19136 - protein, 58 aa, Artificial Sequence
  Synthetic
EMLEKLREVLERAAEVLKRAEESDRTVDEEVERRVREVARSDDEVLKEVKREVERVKT

SEQ ID NO: 19137 - protein, 60 aa, Artificial Sequence
  Synthetic
SEAEEVAKRVKEIAKENADLAREVAKDIKRLADENKKHADDVARDIERLAKELLEAARRG

SEQ ID NO: 19138 - protein, 59 aa, Artificial Sequence
  Synthetic
ERAEKLARDAAEEAKKAAEESNKLIREAAERLKEAARRADKLVEEAARRLEKAAEEARR

SEQ ID NO: 19139 - protein, 60 aa, Artificial Sequence
  Synthetic
DEVDEVVRRDERLAEENLKRNTESSKRDRDLARENLKDAKRVVERIRKLMEDLKKLFDRG

SEQ ID NO: 19140 - protein, 59 aa, Artificial Sequence
  Synthetic
EKLTRRVEESLKRSEEVLRRVNESDKRSLEETRKVLEESNKEIEKVVRDLEELLKEVRR

SEQ ID NO: 19141 - protein, 60 aa, Artificial Sequence
  Synthetic
SEADKVVKEVDDIVARNTEENDKSSKRVEDIIRENDKHAEEVVRDIRRLAEELRELRERG

SEQ ID NO: 19142 - protein, 59 aa, Artificial Sequence
  Synthetic
EELEKRLRDVVRRAEERLRDVNRSDEEVVRRAEELLKRVDDRVKTVVEELKKTLDDERR

SEQ ID NO: 19143 - protein, 60 aa, Artificial Sequence
  Synthetic
EEVDRVVKRDDDLARKNLEENERSSREDDRLVKENEDHAKKVVDDIRKLMEELRELARRG

SEQ ID NO: 19144 - protein, 59 aa, Artificial Sequence
  Synthetic
EELEKRLRESLRRSREVLKRVNESDRDSLERTKKRLEDVDREVRKVVEELRKVIRDEEK

SEQ ID NO: 19145 - protein, 60 aa, Artificial Sequence
  Synthetic
SEAEEVARRVEKIAEDNARHAEKVAKDIEDLARENLELNERTSRRVERLARELLKAARRG

SEQ ID NO: 19146 - protein, 59 aa, Artificial Sequence
  Synthetic
EEARKLARKAAEDARRAAERANELVKRAADELRRAAEEANKSDEDAAREARRAAEEAER

SEQ ID NO: 19147 - protein, 60 aa, Artificial Sequence
  Synthetic
KDVEDVVREDEELAKTNKKHADDVVRRIKELIDRNRRLNEETSKRIEDLVRRLLELARRG

SEQ ID NO: 19148 - protein, 59 aa, Artificial Sequence
  Synthetic
ERVRKEVERSLRKSDEVLRRVNDKVRRVLEELRKVLEDVNRSDEKVLRELEELLERVRT

SEQ ID NO: 19149 - protein, 58 aa, Artificial Sequence
  Synthetic
SEDEKVRKVVEEAKEVNRRAEEAIKDVSERLERVNREVTKRSRDVSEEVRKMLERDAS

SEQ ID NO: 19150 - protein, 56 aa, Artificial Sequence
  Synthetic
VDEVVKRIKELVDRSLELAERIVERNERLVEKSERDVRKIVEDNKRLADEVAKRAT

SEQ ID NO: 19151 - protein, 58 aa, Artificial Sequence
  Synthetic
REDELVDKVLRELEELLRRVKKRLEDVSRDLERVNREVRDELRRVSKKVEDMARRDVG

SEQ ID NO: 19152 - protein, 56 aa, Artificial Sequence
  Synthetic
AETVVRDIRRLAEELLRTVDKIVKDNERLARESRERVRRIVERNEELARDLARKAR

SEQ ID NO: 19153 - protein, 58 aa, Artificial Sequence
  Synthetic
DDEKKVEDVVRKVKKVAEDVRRRLEKVSREVKKVLDEVRRRVEEVSREVEEILRRAAS

SEQ ID NO: 19154 - protein, 56 aa, Artificial Sequence
  Synthetic
ADEVVKRIEDLVRDLERRVDEIVKRNKELVKRVEEEADKIVEDNKRLAEEVLRKAT

SEQ ID NO: 19155 - protein, 57 aa, Artificial Sequence
  Synthetic
DSRRKVKEVIKELEEVLRRVKEEVEKVSRDLERLLKEVKEKLERVSRKVEEEIREKA

SEQ ID NO: 19156 - protein, 56 aa, Artificial Sequence
  Synthetic
ADTVVKRIKELMKDVERIVEEIVRENRKLVTDLLREVDRIVEENERLAEELAERAR

SEQ ID NO: 19157 - protein, 58 aa, Artificial Sequence
  Synthetic
SSKEKVERVVERLRRVNEEVIRLIEKVSRELEEVNKEVRERIERSVKETEDILRTAAS

SEQ ID NO: 19158 - protein, 56 aa, Artificial Sequence
  Synthetic
VDTVVREIEKLMDDSKKKADRIVDENRELVKRSEEAVEELVRRDKKLAEDVFRKAE

SEQ ID NO: 19159 - protein, 58 aa, Artificial Sequence
  Synthetic
DDERKVKKVVKEVRKVDEEVARRLDKVSKELRDVNREVKKKMEDSVKKTEDLAKKDAS

SEQ ID NO: 19160 - protein, 56 aa, Artificial Sequence
  Synthetic
ADTVVKRIKELAEESEKRVDKIVKRNKELVDKSKKDVDELVKRDEELMKDLVEKAR

SEQ ID NO: 19161 - protein, 58 aa, Artificial Sequence
  Synthetic
SAEEKVRKVLKELREVNERVERELKRVSDESERVDDEVNTRAKKVVRDVERVLEERAG

SEQ ID NO: 19162 - protein, 56 aa, Artificial Sequence
  Synthetic
VDEVVERIERLARESKKRVERIVRENEKSARESEKRADEIVKTIEELAERVARRAT

SEQ ID NO: 19163 - protein, 58 aa, Artificial Sequence
  Synthetic
KDEERVKEVVKKLRKVNEDVRRLIERVSRESKRLDEEVNRELDESAKDTERALRERLG

SEQ ID NO: 19164 - protein, 56 aa, Artificial Sequence
  Synthetic
ADEVVKEIEKLAKTSEELARRIVRENEESARESLERARKLVEDDRRLVKEVVERAE

SEQ ID NO: 19165 - protein, 60 aa, Artificial Sequence
  Synthetic
DLEERLATVVRKVEEDLKKLRRDNEKVIREVEKLNEDLNRRNKKLIDEVRKLLEKAKREG

SEQ ID NO: 19166 - protein, 59 aa, Artificial Sequence
  Synthetic
EKRVRELLEKIKRLLEEVDRRVKESIKEIEDSLRRSKEKADRSIEEIKKLLDDLRERAR

SEQ ID NO: 19167 - protein, 59 aa, Artificial Sequence
  Synthetic
SVEDLLRRVVEEVRKELERLKRKNEKVVKEVRKKNKEVNDRNEEVIRRVEKRLKKLKED

SEQ ID NO: 19168 - protein, 59 aa, Artificial Sequence
  Synthetic
EEEVRRLVRRIEKIVDEVRKRVDKSVEEIKRSLKRSKELADESLERIRRLLEEIDERVR

SEQ ID NO: 19169 - protein, 60 aa, Artificial Sequence
  Synthetic
SSDEELKKVLEDMKRVLEKVREDMKRVNDELKEAVERVKKESDDVDRELRRVIEEVVRED

SEQ ID NO: 19170 - protein, 56 aa, Artificial Sequence
  Synthetic
VKDLVRTVERLVEEIKDLVRKDVERVKKIVRRIEDLAKKDVEVSEKLVKEIKDRAK

SEQ ID NO: 19171 - protein, 60 aa, Artificial Sequence
  Synthetic
SAKELLDDVAKKLEEVVERVARKLDEVDERLREMIERVRKELEDVNRRLRDLVRRVVDKD

SEQ ID NO: 19172 - protein, 56 aa, Artificial Sequence
  Synthetic
VEEVVRDVERIVDEIEKRAEKVVRDSEKLVRDIEELVRRDVREVERIAEEIEKEAT

SEQ ID NO: 19173 - protein, 60 aa, Artificial Sequence
  Synthetic
SADEELERVLRELDKVIKDVVEESRDVDRKLERVVREVERLLDDVDRRLKEVIERVVREV

SEQ ID NO: 19174 - protein, 56 aa, Artificial Sequence
  Synthetic
VKDVVTEVKKLVETVKRLVEENVKRVEKIAEEIRRLVEKVVRESDELVERIERRVR

SEQ ID NO: 19175 - protein, 59 aa, Artificial Sequence
  Synthetic
SAEELIRKAAEDARRANKEAEDLIREAAKEARRANEEAERLIREAAKRAEDALRDADRK

SEQ ID NO: 19176 - protein, 59 aa, Artificial Sequence
  Synthetic
EEEAKKLADDIREAAKRSLDRARELAKRIREAARRSLEEAKKLAEEIKKAAEKALRDAT

SEQ ID NO: 19177 - protein, 60 aa, Artificial Sequence
  Synthetic
SAVERVVREVKKTVDESRKRAEKEKREVEDVVRRIREKVKRVVDDNRRVVETIKELSKER

SEQ ID NO: 19178 - protein, 59 aa, Artificial Sequence
  Synthetic
EEAREKLDRVRKELDDANRRVEEELRRVARELEKVLREVEELLRKVDEDIRRVLDEERR

SEQ ID NO: 19179 - protein, 60 aa, Artificial Sequence
  Synthetic
KDVEEVARKVKRVAERSEELVAELVKKNKKVVDESREKVDDVVRRNKELVDTIRDLARRR

SEQ ID NO: 19180 - protein, 59 aa, Artificial Sequence
  Synthetic
EEIRKLAEDVKRELERVNKKVKELSDRAAEELKRVNEEVRKKLEEVDREIRKVLEEVRK

SEQ ID NO: 19181 - protein, 60 aa, Artificial Sequence
  Synthetic
SLMEEVKKEVDKVVREIKELVRKVEEDVKKVVKESRDKVDKVVKENKKVVEKIRDLARRR

SEQ ID NO: 19182 - protein, 59 aa, Artificial Sequence
  Synthetic
DEIRKLIKEALDKLKEVLDEARDRLKKVKEELETVNREVEKLLRDVDREIEKVLKEVEK

SEQ ID NO: 19183 - protein, 60 aa, Artificial Sequence
  Synthetic
SEAEKIVREVERVVEESRRVAKENEKEVDKVVDTIRKLIEDLARRVEDILKKIEEERRKG

SEQ ID NO: 19184 - protein, 60 aa, Artificial Sequence
  Synthetic
VKRIEDLLREVEERLRRVSEEVKKRLKELHERVEEVLRELRKRLRDLERKARKVLEEAKK

SEQ ID NO: 19185 - protein, 57 aa, Artificial Sequence
  Synthetic
DVKEVLDEARKVVEDSIRRSKELIDEVRKRVEESVEESKRLAETVAEEVREVIERAR

SEQ ID NO: 19186 - protein, 56 aa, Artificial Sequence
  Synthetic
IETVLREVKRLVRENVKRIAELVKTIEDLVRENSERVRRVVREIRELVKELEKKAR

SEQ ID NO: 19187 - protein, 57 aa, Artificial Sequence
  Synthetic
DVDELLKRVEDEVRRSKEESEKLRKEVRKEVEDSAKTSKDLIDDARRTVEEVIKKVK

SEQ ID NO: 19188 - protein, 56 aa, Artificial Sequence
  Synthetic
VDTVVERIRKLVKENSDRVREVVDTIKKLVEENVREVRRLVEEIKRLVEEVKRREE

SEQ ID NO: 19189 - protein, 57 aa, Artificial Sequence
  Synthetic
DVKEVLKRAEEEVRRSIKRTREVLERVEKMVRDSSRTTTDLIRKVRREVKRVIDEVN

SEQ ID NO: 19190 - protein, 56 aa, Artificial Sequence
  Synthetic
IDTVLEDVKRLVKENSEKIDEVVREIRELVETNRKLVEDLVREIKELVEKALRDAK

SEQ ID NO: 19191 - protein, 57 aa, Artificial Sequence
  Synthetic
DVKEVLKRAKDEVRRSSDRTRRLIEKVRDESERVVEEVKKLNEDVNREVERVIREVK

SEQ ID NO: 19192 - protein, 56 aa, Artificial Sequence
  Synthetic
IDTVLREVEKLVRDNERLVEKLVKEVEDSVRETKKRVEESVDTVRRIVEELKRRAT

SEQ ID NO: 19193 - protein, 60 aa, Artificial Sequence
  Synthetic
SEAEEVLREVKEVVDRSRELAERVLRAVRELVKRDEDLARKILEDVARVVKTIDDLARER

SEQ ID NO: 19194 - protein, 56 aa, Artificial Sequence
  Synthetic
KEVVDRADRALREVNKRLDEVVREVEKLLRESLDRSRRVIEEVAKRLEEVLKKLED

SEQ ID NO: 19195 - protein, 60 aa, Artificial Sequence
  Synthetic
DEMDEVRREVERVVREDEKLARDLKRRVEKVVEDIKRSADEVLKEVKKLVEEIRELMKKR

SEQ ID NO: 19196 - protein, 56 aa, Artificial Sequence
  Synthetic
REVVRRVEEELERSLRKSREVVKRVEKELEDVLREHRKVLEEVTDLLRRVLEELRR

SEQ ID NO: 19197 - protein, 60 aa, Artificial Sequence
  Synthetic
REAEEILKKVAEVVKEDKKLADDLRKKNKETVDDIRRKAEELLKRVKKVVEELKRRMEEG

SEQ ID NO: 19198 - protein, 59 aa, Artificial Sequence
  Synthetic
DELRKIAEEVRKRLEDSVRTTRDIIRRVKRENEEVIKELERVMRKVREDLKRVKEEIER

SEQ ID NO: 19199 - protein, 59 aa, Artificial Sequence
  Synthetic
SREEVAKEVRELIARSEKETRDIIREVEDRMRRSKEETEEVIKEVKRLLEEVKKRLEEK

SEQ ID NO: 19200 - protein, 56 aa, Artificial Sequence
  Synthetic
AEEILRTVKKVVDRDRELAKRLLDEARELVRTNRELVKRVLETVTRLVKKIDDEAR

SEQ ID NO: 19201 - protein, 60 aa, Artificial Sequence
  Synthetic
DEEEVEKRVKDLLRESTERTKEVNERVRRLAEESRKRTEEIIREVRRLAEEVEERLRRRG

SEQ ID NO: 19202 - protein, 56 aa, Artificial Sequence
  Synthetic
VRELLETVKKLVKDDVDIVRRNLEEVKKLVETNVRLAEEVLKEVDRLVKKVEEDAR

SEQ ID NO: 19203 - protein, 57 aa, Artificial Sequence
  Synthetic
DELDEIRKRVEELIKRSEEDSREVRRRLEEIIERNRKISRDVEREIEKLIKDVRDSN

SEQ ID NO: 19204 - protein, 62 aa, Artificial Sequence
  Synthetic
GEELRRVEEVVKRVRELVERSKEETDKIAEDVRRLLKESNDDTERIKRKVEEMLKELEERIK

SEQ ID NO: 19205 - protein, 57 aa, Artificial Sequence
  Synthetic
RELDEVVKTVRKLVDESKKESDDVAREARELLEKLERESEEVVRRVRELVKELKKKR

SEQ ID NO: 19206 - protein, 56 aa, Artificial Sequence
  Synthetic
VDEVLRKAKELIDDSRRLIEDVKRRLKELIDRDRRLIERVLEEAERLIRELDEEAR

SEQ ID NO: 19207 - protein, 60 aa, Artificial Sequence
  Synthetic
KEIEELDKMVEDIVRELDELVRAHTETVDRLIRDLERSNEELRKLIKKIVDELEDLVRRG

SEQ ID NO: 19208 - protein, 62 aa, Artificial Sequence
  Synthetic
EEVVRRLKDVERKVKKLAEDVKEKLRRSVERVTKLLKEVEDNSREVEKEAEERVDRVLKKVK

SEQ ID NO: 19209 - protein, 56 aa, Artificial Sequence
  Synthetic
REVEELVERIERSSRRALERLEDLDRTIKKSSEDARRRLKEMDDRLEELVKRARDN

SEQ ID NO: 19210 - protein, 56 aa, Artificial Sequence
  Synthetic
EEEIKKVLEEDRKLVEKLERDNKRVLDEDKELVRRNEERNREVLERIRELIERART

SEQ ID NO: 19211 - protein, 56 aa, Artificial Sequence
  Synthetic
DEVEKLIKDIRDIIRRVEEAVARLVEENNKLVKEVDDRLRELSKENRDIVRKVREG

SEQ ID NO: 19212 - protein, 60 aa, Artificial Sequence
  Synthetic
KRTLLEEAKRVLEDIEKEARDLLRRLEEIIRRTRKLVKDILDRSRDILRRTRELVDRVRR

SEQ ID NO: 19213 - protein, 57 aa, Artificial Sequence
  Synthetic
KEAEDLLRRIEDLIRKVKKEVEDLVRENNRLVEKVVRELEKLSDELRKLIKRIKDAG

SEQ ID NO: 19214 - protein, 60 aa, Artificial Sequence
  Synthetic
KETLLRDIERIRREIEKLIEELLRRAEEIIRDTERLVEKILRESKELLKEIRELAEREKQ

SEQ ID NO: 19215 - protein, 59 aa, Artificial Sequence
  Synthetic
DLERVVEESSRLVERVVRRNKKVVEDIRRRVREVERKNEEVTKEIKKILDEVRRRLERD

SEQ ID NO: 19216 - protein, 59 aa, Artificial Sequence
  Synthetic
REELKKLLERSREMLEKSERTVDTSREEAKRVLEESEELVERTLREVEEIIRRVIERVR

SEQ ID NO: 19217 - protein, 60 aa, Artificial Sequence
  Synthetic
SLEEVLRAVRKLAEDVKRKNKEVLDRIRDSSRRSEEKLEDSLRKIEELVRKLEEELKRDG

SEQ ID NO: 19218 - protein, 59 aa, Artificial Sequence
  Synthetic
DEDLKRLLEEIKRVLEESEEKVERSLREMEEVDKETEKRSRKLNREVREVVKDVADKVR

SEQ ID NO: 19219 - protein, 60 aa, Artificial Sequence
  Synthetic
SRLEDLLRKVKKVLDEIRRTIEKSLEDVRELIKRIERTIEKLLERSRDVVRRVLEDAERR

SEQ ID NO: 19220 - protein, 59 aa, Artificial Sequence
  Synthetic
EKAKEVLKEVKDRVDEVAKELTDVNRDIRRIVDELRRRAEKVVRESRELSRELREELEK

SEQ ID NO: 19221 - protein, 60 aa, Artificial Sequence
  Synthetic
SELERLLEEVEKELRKIERTITELLRRSRELLEEIERAIKESLRDSERLLREIEDTVRKR

SEQ ID NO: 19222 - protein, 59 aa, Artificial Sequence
  Synthetic
SKVREVLREVRERVKEVVERLKRVVEESRKRSEEVKKKLEEVNRRSEEESKRVKEELKK

SEQ ID NO: 19223 - protein, 60 aa, Artificial Sequence
  Synthetic
KLEEVLRTVRKLVEDLREELERVVRTSRELTRRLEEELKEVVKRSEDLSRRLEEILKRDA

SEQ ID NO: 19224 - protein, 55 aa, Artificial Sequence
  Synthetic
TEALKEVKRLVDEIRKTIEEALRDSKRLVDEIRETIKRSLEEVEKEVRKAEERIR

SEQ ID NO: 19225 - protein, 59 aa, Artificial Sequence
  Synthetic
SIEDVLRAVEKLLRDLKRRSEEVVKHSETELRRLLEEVRRVLEHSREALERLEERIKDV

SEQ ID NO: 19226 - protein, 59 aa, Artificial Sequence
  Synthetic
DEVIKEILERVKKLIEEIDERNKELNERTKELIKRIKDRLKELNDKTEKAIDKIRKEVE

SEQ ID NO: 19227 - protein, 59 aa, Artificial Sequence
  Synthetic
SIEEVLREVEELLKELEKRARDVLRHSEELLRDVIRRSEEVVKHSEDLLRKLKEAAKDV

SEQ ID NO: 19228 - protein, 59 aa, Artificial Sequence
  Synthetic
DEELKKILDEVRKVIKELEDKLRKLNKKTEDVIRELIERNDRLNKDTKRVIDELKEKVR

SEQ ID NO: 19229 - protein, 59 aa, Artificial Sequence
  Synthetic
SIEEVVEEVKELLERLIRRSEDVLRHSKKLLEELERKSERVVEHSEDLLRKLEEKIKDV

SEQ ID NO: 19230 - protein, 59 aa, Artificial Sequence
  Synthetic
DETLKRILEEVREVIKKLIKSSEDVNRETEELIRRLEDRNRKLNEKTEKVIREIEEEVK

SEQ ID NO: 19231 - protein, 59 aa, Artificial Sequence
  Synthetic
TVEDVLRELRERLKESEKRDRDSVRKAEELLRRSEKRTDDVVKHSERLLEELEEAVRRI

SEQ ID NO: 19232 - protein, 59 aa, Artificial Sequence
  Synthetic
EDVVRRLLEEVEELLRRNVKKSEELLKEIRERLEDNIRKVEKVNRDNKREIEEILRRVK

SEQ ID NO: 19233 - protein, 59 aa, Artificial Sequence
  Synthetic
TVEEVLKEAEDLLKESKERSEDSARRAEEILRRSEERTRKVVEHSREMARRLMEKVKEK

SEQ ID NO: 19234 - protein, 59 aa, Artificial Sequence
  Synthetic
EKVVEDVLREVEKLVRDNIEHSKRLLDEIRRRVEENIRRVDEVNKRNEELIREVEERVR

SEQ ID NO: 19235 - protein, 60 aa, Artificial Sequence
  Synthetic
SKVEEILERVKRLIEENIKRSEEILEEVRRLIRENTEVSKKLLEEVKREITELEKEVRED

SEQ ID NO: 19236 - protein, 59 aa, Artificial Sequence
  Synthetic
ERVKDVLRRLKKIVDESKRRSDKVNKEIEDRVRESEKKSRKVNEDIKRLVKRVADEVER

SEQ ID NO: 19237 - protein, 60 aa, Artificial Sequence
  Synthetic
SDIEDLLKKVEDLIRRNIETSRRLLEEVRKLIEENIRLAERILEEVRRLIEELARLTRED

SEQ ID NO: 19238 - protein, 59 aa, Artificial Sequence
  Synthetic
EKVKDALRRLRDLIRRSKEDSERVNEEIKDIVRKSRETSEDVVRRARELLDKVRREVEK

SEQ ID NO: 19239 - protein, 60 aa, Artificial Sequence
  Synthetic
SELEELLKEVAKLIKRNKDRVRKILDEVRKLIKRNEDVSRRLLEDVERLIKELEREVRED

SEQ ID NO: 19240 - protein, 59 aa, Artificial Sequence
  Synthetic
KKVEDILRTLEELIRESERTSEEVLRELREEAEESKRKSKRVNDRIRELVEKVDREVDK

SEQ ID NO: 19241 - protein, 60 aa, Artificial Sequence
  Synthetic
SKLERLLEEVEKLIRRNKRIVREILREVRELIERNIRVSEEINRRNRRLIEEIRRLVEED

SEQ ID NO: 19242 - protein, 59 aa, Artificial Sequence
  Synthetic
ERVKRILKEIERLVEESKRESERVLEEIKELVKDSKRRSKEVNDHSKKLVDEVREAVKK

SEQ ID NO: 19243 - protein, 59 aa, Artificial Sequence
  Synthetic
SRIDELLKEIRKVTEKTRRDVERLLEEIRKVTDKSRKDSERSLDEARKVLDTIRKLLED

SEQ ID NO: 19244 - protein, 55 aa, Artificial Sequence
  Synthetic
EALERIKRSSEELAEEVKRVLDEVRRSSEELEKRARDSLRELRELVKRVEEEARK

SEQ ID NO: 19245 - protein, 59 aa, Artificial Sequence
  Synthetic
SRIEKLLDEIRKVSKKSIDEVRKILEEVEKVTRDSIRKLRKLLREIEKVLEEIERLLKN

SEQ ID NO: 19246 - protein, 55 aa, Artificial Sequence
  Synthetic
EALKRIKELSDEVREEVKKVLRKIEESSERLEEEAKKVLDTVRELVERVARRAKE

SEQ ID NO: 19247 - protein, 60 aa, Artificial Sequence
  Synthetic
REAEEALRRVEEVVRRSKTELKKLLEDVRRLIEESERELRDLLRRVEEVIRRIREELRER

SEQ ID NO: 19248 - protein, 56 aa, Artificial Sequence
  Synthetic
KEMLRTVDELLKDSERDSERVLREIEELLERSKRKSEEVLREIERLLEKIEREVRK

SEQ ID NO: 19249 - protein, 57 aa, Artificial Sequence
  Synthetic
SEVEEVAREVDELVKESRDESRRIVEEAKRLLKESNKSVKDIERDARRLVKEVEDAV

SEQ ID NO: 19250 - protein, 56 aa, Artificial Sequence
  Synthetic
VKKVLDEVRELAERSKDLNRRLLERIRELVRRSKERNKELLKRLRDLVERVKREIK

SEQ ID NO: 19251 - protein, 57 aa, Artificial Sequence
  Synthetic
DEVEEVKKDAERLNKELHESLRRSNEEAKRLLKESKDASREVVKDARRLTKELRETM

SEQ ID NO: 19252 - protein, 56 aa, Artificial Sequence
  Synthetic
VEKVLRDLRRLTEETKRRNRETLEEIRRLIERSKEEIKRLLEELRELTKRTKDRIR

SEQ ID NO: 19253 - protein, 57 aa, Artificial Sequence
  Synthetic
DEVKEVKDRARKLVEEVKRAVDEVRKRADELNKEVHESLRRSNREAERLVKEVEDTV

SEQ ID NO: 19254 - protein, 56 aa, Artificial Sequence
  Synthetic
VETVLREITELAKKILRDIEELLREITKITEESKRENEKSLRELEDLARRVKEKTR

SEQ ID NO: 19255 - protein, 57 aa, Artificial Sequence
  Synthetic
DEVERLVEELERLLREVRDSVRRSNTEAKELNKEVHEAIRRVVEEARRLLEEVRRTA

SEQ ID NO: 19256 - protein, 56 aa, Artificial Sequence
  Synthetic
VETVLRRVEEVARRVKKLNEDTLRTLRRITEDSLRKIEKLLRDIEKLVREVVERLR

SEQ ID NO: 19257 - protein, 60 aa, Artificial Sequence
  Synthetic
SEIEDLERRIKEVVDDLRRLVEENSKKIDDLLRRLKDLIRKVEEMNRKLIREAEELVREE

SEQ ID NO: 19258 - protein, 58 aa, Artificial Sequence
  Synthetic
EELRKVEESVRRLAEEIKKELEDSRRRVEELVREIEKELEDVNRDARRLVDKVREELR

SEQ ID NO: 19259 - protein, 57 aa, Artificial Sequence
  Synthetic
REVEELKKTLDRLVEESKRESDKVREDAERTVRESEDKSRRVKDEARRSLEEVEEDV

SEQ ID NO: 19260 - protein, 59 aa, Artificial Sequence
  Synthetic
KDEIKKILEEAEEVVRDSKKKIEDLLRHNKKRVDDSLRKIEEILKHNRDEIERVREEIR

SEQ ID NO: 19261 - protein, 57 aa, Artificial Sequence
  Synthetic
DEVETVREEAKRLVEESRKESRRVEEELKKLLRRVEEEARKVKEELEKSVDEVRKAV

SEQ ID NO: 19262 - protein, 59 aa, Artificial Sequence
  Synthetic
REEIKKILERVREVVKRSKDEIREILKEVRKMIDKVRKEIKEILDHNKEVVRKIKEETK

SEQ ID NO: 19263 - protein, 57 aa, Artificial Sequence
  Synthetic
SEVEEVKERAERLVRESEELSDRVRREAEKTIEAVRELVERIRKRLKESVEEVERRV

SEQ ID NO: 19264 - protein, 59 aa, Artificial Sequence
  Synthetic
REEIKKLLEEVKRVVDKSKRDIDELLKHNRRKIDEVLRELEEILRHNETRIKEVLDRAR

SEQ ID NO: 19265 - protein, 60 aa, Artificial Sequence
  Synthetic
SEVEKLLREAEEDVERILKRLEDSMDSNRELVERILETLKRSLDEVEKEIRKIIEELKRR

SEQ ID NO: 19266 - protein, 55 aa, Artificial Sequence
  Synthetic
DKVIKRLEDLLRKVEKVVRDTNRTIKDSIRRVKEVVDTTNREAEKLLRRVEDTVR

SEQ ID NO: 19267 - protein, 60 aa, Artificial Sequence
  Synthetic
SRVEKLLDEVRRLAEDILRDLERSMRSNEELVRKILEKLKESLESNRRLVKRILERLREE

SEQ ID NO: 19268 - protein, 55 aa, Artificial Sequence
  Synthetic
EKVIREVERLIEEVKRVVDDTNRRAEESIKEVRDLVRRTNEEIEKTIEEVDREVK

SEQ ID NO: 19269 - protein, 57 aa, Artificial Sequence
  Synthetic
REAEEIKKALDKLAEELRELLERSRDTVRKLIKELRDLVRESRRRVKELIDDIRRRV

SEQ ID NO: 19270 - protein, 59 aa, Artificial Sequence
  Synthetic
REELKRLLEEVERLIERLKERIKRLTEESEKLVRELLKLIEKSTKESEEDVKRLVDEAK

SEQ ID NO: 19271 - protein, 58 aa, Artificial Sequence
  Synthetic
SEIEDLLRRVRRLIEESEEVIKRVADEVKEIIDRSREKIKRVTEESREIIKRLKKDGK

SEQ ID NO: 19272 - protein, 58 aa, Artificial Sequence
  Synthetic
RRVEDVERDIRRLVRKLREDNKRIAKTIEDLVRELRELNKRSEDETRKLVKELRDAAK

SEQ ID NO: 19273 - protein, 61 aa, Artificial Sequence
  Synthetic
SEVERIKKAVEDLVRKLRKVSKETLDESRELVKELKERDKESEKDSRRLAERLRKLLEEKN

SEQ ID NO: 19274 - protein, 59 aa, Artificial Sequence
  Synthetic
RKVVKDILDEVKKLIDDIEEHSKRVADRNRRLIEKIKKDTEDVIKRNRDLVTEIEKRIR

SEQ ID NO: 19275 - protein, 61 aa, Artificial Sequence
  Synthetic
SEVEKIEERVKRLVEELKKSLKESEEETERLARELRDVDRRSKEESRRLAEELEDLLRRRN

SEQ ID NO: 19276 - protein, 59 aa, Artificial Sequence
  Synthetic
DKVVEELLKEIEEEIRKILETNDKVVKENRRLAREILEDTKRVVDRNRELIKRIAERIK

SEQ ID NO: 19277 - protein, 61 aa, Artificial Sequence
  Synthetic
DEVETIAKEVKELADKLRREVEESRKDSEDLVRKLRESLKESRKRSKDLVDELRKLLERKN

SEQ ID NO: 19278 - protein, 59 aa, Artificial Sequence
  Synthetic
KKVVDDLRKRVEKLIKEIEEDIERVIRRSRKLIEDILRDNERVVKENEDLIREIEERIR

SEQ ID NO: 19279 - protein, 61 aa, Artificial Sequence
  Synthetic
SDVERVEEELRKLLKEIEDSVRESERRLEKLLEDLKRSTEKTKKELKELIDRLEERVRERG

SEQ ID NO: 19280 - protein, 59 aa, Artificial Sequence
  Synthetic
SERVKEILERVRKLVEDVLRRNKRLVEEVERLIEEILRVDERIVREVRELIKRIEERIE

SEQ ID NO: 19281 - protein, 61 aa, Artificial Sequence
  Synthetic
SSVEEVKKTLEDLLRESDKSVRESERRLRELLRESDESVERSRKTLEDLIRELEDLVRKRG

SEQ ID NO: 19282 - protein, 59 aa, Artificial Sequence
  Synthetic
DREVEKILREVTKLIEESLRRDREITEEVRDLIKKSKEKDKEIVDTVRRLIREIKERIR

SEQ ID NO: 19283 - protein, 61 aa, Artificial Sequence
  Synthetic
RSVEEVVKTLEDLLEKLERSVRESEERLKKLLAESDDSVRKSAEELRRLIEELKDLVRREA

SEQ ID NO: 19284 - protein, 59 aa, Artificial Sequence
  Synthetic
EREVKRLLDEVERLIDEIRERDKDIVREVDKLIKDSKREDKRIVDDVRRLIEEIKRRIK

SEQ ID NO: 19285 - protein, 61 aa, Artificial Sequence
  Synthetic
SSVEEVKRELEKLLEDSDRSVEESKKTLRRLLEESNKELRRVAERLKDLIRELKKRVKERG

SEQ ID NO: 19286 - protein, 59 aa, Artificial Sequence
  Synthetic
DREVEEILRRVRKLIEESKTMDKKIVDDVRKLIEESLRDIERIVEDVERLIKEIKERIT

SEQ ID NO: 19287 - protein, 61 aa, Artificial Sequence
  Synthetic
SSVETVEKELRRLIKELRDSVKKSEDDLRRLLEESNRLVREVERRLRELLEKLRKLVEERA

SEQ ID NO: 19288 - protein, 59 aa, Artificial Sequence
  Synthetic
DREVKRILDEVKDRIRRILREDEEIVKEVRRRIKRSEEAIREIAREVDREIEDIERRIR

SEQ ID NO: 19289 - protein, 58 aa, Artificial Sequence
  Synthetic
SEVEELEERARKLLEDVERLTREVEERAKELVKRVKDSSKRSEDEIRRLLRKLLETSG

SEQ ID NO: 19290 - protein, 56 aa, Artificial Sequence
  Synthetic
VEKVIRTLEEEVRRDEEKIREVLERVEDLIREDLRRDEELVKELEKLIREVDEKER

SEQ ID NO: 19291 - protein, 58 aa, Artificial Sequence
  Synthetic
KEVEDLEEELKKLLKEVKTRTEKVVRDAEKSVRDLEKSSRDSDRTLKDLLRRLMETTG

SEQ ID NO: 19292 - protein, 56 aa, Artificial Sequence
  Synthetic
VKKVLDEVRRLVEEDKKRIEEVLKENRESVKRDKELDDRLLERVRELIERALERAR

SEQ ID NO: 19293 - protein, 58 aa, Artificial Sequence
  Synthetic
SEVERLEEEAKRLLEELKRLVERVVREAERSVEKVRDSVRRSEEEARRLLEEITKDDG

SEQ ID NO: 19294 - protein, 56 aa, Artificial Sequence
  Synthetic
VDKVVEDLKDDIRKVKKRIEEVLDENRKSVRKLDEDDRRLVDELRRLVKEVKDKVR

SEQ ID NO: 19295 - protein, 56 aa, Artificial Sequence
  Synthetic
KEVEDLKEELKKLVEELERLVEKNVREARELVKRSEEESRRVAETARRLVDEIRRA

SEQ ID NO: 19296 - protein, 59 aa, Artificial Sequence
  Synthetic
RRTITELLKEVEELVKRVLDAIRKSNREVEKLVRESLRRIEKLLREVEKLVKELLERRK

SEQ ID NO: 19297 - protein, 56 aa, Artificial Sequence
  Synthetic
DEVERLEEELKRLVKEIEDSVRESKKEAEETLRESRKLSREVEERARRLVEELKRK

SEQ ID NO: 19298 - protein, 59 aa, Artificial Sequence
  Synthetic
EREIRELLEEVRKVVEEIKRRDDELVKENRRSIEESKRRIEELLKEVKELVERVTDTER

SEQ ID NO: 19299 - protein, 56 aa, Artificial Sequence
  Synthetic
RDVEEVKKEAEELVKKSEESVRRSKEELERTLKRSREESERVKETAKKLVEKIERD

SEQ ID NO: 19300 - protein, 59 aa, Artificial Sequence
  Synthetic
KETIKRLLDEVRKLVEDSLRHDEELVERNKKSIKDSLDEIERLLREIEELVRKVEEDER

SEQ ID NO: 19301 - protein, 56 aa, Artificial Sequence
  Synthetic
SDVDRVKEDAKRLVEESKRSVDESAKDMRRTLKRSRDESRRVKEELKRLVDRVKES

SEQ ID NO: 19302 - protein, 59 aa, Artificial Sequence
  Synthetic
KDEIRELLERVKKLVDESRRHDKRLVEENRRSARDSLREIERLLREVRKLVEKVLRDRK

SEQ ID NO: 19303 - protein, 60 aa, Artificial Sequence
  Synthetic
DEVETALEEVKELLERVLRKIEDDLRRVRDLLEKLKRTNEELLRKVREEVRRLADLIRKR

SEQ ID NO: 19304 - protein, 55 aa, Artificial Sequence
  Synthetic
ETVKREIEKARETLERLLKRSEEEVDRVKKEVEEISRRVKKEVKKLVDEIRERLR

SEQ ID NO: 19305 - protein, 60 aa, Artificial Sequence
  Synthetic
RRVEEVAKELKRIAEKLKRDIEELLRDDKRLADELRETNKELLRKDKEILDRLAEEIKRR

SEQ ID NO: 19306 - protein, 55 aa, Artificial Sequence
  Synthetic
ETVDRKIDELAERIRRLLEKVKRHVEETKRDVRRVSEEVRKHVEETKRDVRRRLK

SEQ ID NO: 19307 - protein, 60 aa, Artificial Sequence
  Synthetic
SRVEDLVRRIRELVRRDLKRIKDLEEEIKRLAEEIERHSKKVVDELKELADRLRKMLEEG

SEQ ID NO: 19308 - protein, 59 aa, Artificial Sequence
  Synthetic
KEKVDDIRREVKRVVRESEEANKRVRKLVEDIVKRAEDSNRRVEELVRELVEDLKRAAK

SEQ ID NO: 19309 - protein, 60 aa, Artificial Sequence
  Synthetic
SEVDELLKTIEKLARDDVKKIREVVEENKREVRRLEEHSKEVVKEIKDRIKEVLELLRRG

SEQ ID NO: 19310 - protein, 59 aa, Artificial Sequence
  Synthetic
ERVLERVERLVRRLAEESRRANEKSKEDTKRLEDRLKKSNDDLEKLVRDVVTRVREEAD

SEQ ID NO: 19311 - protein, 60 aa, Artificial Sequence
  Synthetic
DEVKELEKRIRKLVREIEEHSKEVVKENRRLVEEDLETIKEVLREIKRRIKKLLELLERG

SEQ ID NO: 19312 - protein, 59 aa, Artificial Sequence
  Synthetic
KDVLKTIKDTVEELVERLKRSNERSREETKKLVKRSREANKRVEDLVRKVVKELREAEK

SEQ ID NO: 19313 - protein, 60 aa, Artificial Sequence
  Synthetic
EEVERIVKEIRDLAEKDKEHSKRVEEEIRRLVEEVERHSRRVEEEIRRLAEELKRLLDRG

SEQ ID NO: 19314 - protein, 59 aa, Artificial Sequence
  Synthetic
EEKLEDLERKVRKLADESREVNDRLRELVERVVRRLEEVNERLERLVEELRRRLEEAKR

SEQ ID NO: 19315 - protein, 60 aa, Artificial Sequence
  Synthetic
DEVEELVERIKRLVERDEREIKRVEDEIERLVRRVDEHSKRVEEEIRRLVTELMELLDRG

SEQ ID NO: 19316 - protein, 59 aa, Artificial Sequence
  Synthetic
ERVVEKVRRLVDKLAERSRDLLRKLRDLVRRVVKRLEDVNRRLEELVRKLAEELKEKSR

SEQ ID NO: 19317 - protein, 60 aa, Artificial Sequence
  Synthetic
SEIEKILDDIRREAEKDLRLSEKIVEDIKRLAERDIKRLREIVEEIEKLLREVSDELRKR

SEQ ID NO: 19318 - protein, 62 aa, Artificial Sequence
  Synthetic
EDAERLIREVEKLVRDLVRESEKSNEEVRKLVEDLVRESDKVLKDVKRLVDEVVRRAREEVK

SEQ ID NO: 19319 - protein, 60 aa, Artificial Sequence
  Synthetic
SRIDEIVKRIEELARRDEEVSREIVKEIRDLAKRDEDTSKRIVEEIKELVKKIKEELERS

SEQ ID NO: 19320 - protein, 62 aa, Artificial Sequence
  Synthetic
EDAKRLLDKVRKTVEDLVRRSRKSNEDVRREVEKLVDRSRKSNTTVERLVRKVVRELRETVR

SEQ ID NO: 19321 - protein, 60 aa, Artificial Sequence
  Synthetic
SRAEEIVERIKKLAEDDKRESDRIVEEIKKLARDIEEAIRRIVKEIRDLVKEVRDVLERE

SEQ ID NO: 19322 - protein, 62 aa, Artificial Sequence
  Synthetic
ERAKELVEEVERLVRELVKDSDRSNKEVRRTVKEIVERAEKLVRDVEEDVERLVRDLKRKVK

SEQ ID NO: 19323 - protein, 60 aa, Artificial Sequence
  Synthetic
SEIEKILKEIEDLARRDEEVSKKIVEDIRRLAKEVEDTSRDIVRKIEELAKRVLDRLRKD

SEQ ID NO: 19324 - protein, 62 aa, Artificial Sequence
  Synthetic
EDAERLVREVEDLVRRLVRRSEKSNEEVKRTVEELVRRMEESNDRVRDLVRRLVEELKRAVD

SEQ ID NO: 19325 - protein, 60 aa, Artificial Sequence
  Synthetic
SEIEKLRKTVERIKEEVKRLSDEHKKRTRELERTSERLVEEHRERTEELRRRIEEIVRKK

SEQ ID NO: 19326 - protein, 56 aa, Artificial Sequence
  Synthetic
IDTLVEEIKELMKEDSERIKKSVKEVDDLAKEDSDRIRDSVRTVKELADEAIRRAK

SEQ ID NO: 19327 - protein, 60 aa, Artificial Sequence
  Synthetic
SEIERLEDRIRRLIRDSRELVKTLKKELKEIIERLEELSERLRREIERVVREVEDVVRKR

SEQ ID NO: 19328 - protein, 56 aa, Artificial Sequence
  Synthetic
IDELLKKLDEIATRDREKIERLREEIRKIARKDEEDIRKLVKEIRDEVRKLKEDAR

SEQ ID NO: 19329 - protein, 55 aa, Artificial Sequence
  Synthetic
SEVEELRELVKRLIERIKRVVETNERDLEELIKRVKDAVKKNKEDLERLIEEIDR

SEQ ID NO: 19330 - protein, 55 aa, Artificial Sequence
  Synthetic
KELLDELKRLIDEVEKKLRESNERVRRLAEEVLRRSKESNDRVRDEARKVKETAR

SEQ ID NO: 19331 - protein, 55 aa, Artificial Sequence
  Synthetic
DEVEALKRTVEELIKRIRKAVEDNERDLERLLKESRDVVKKNEEDLKRLIEEIER

SEQ ID NO: 19332 - protein, 56 aa, Artificial Sequence
  Synthetic
IEKLLRELERVIEEIVRRLEDSNRRVRDIARRDKERSKRSNDRVRRLAEEVKERAK

SEQ ID NO: 19333 - protein, 56 aa, Artificial Sequence
  Synthetic
SEVEELKKLVEELRREIRRLVRENEEDLKKLLEESKRMVERLKELVKKLIEDIRRT

SEQ ID NO: 19334 - protein, 55 aa, Artificial Sequence
  Synthetic
KELVDELKRVADEIVRRIRESNRKVRKIAEEDKTRIKRLLEELERLIADVERRAT

SEQ ID NO: 19335 - protein, 60 aa, Artificial Sequence
  Synthetic
SEVERLLRELERSVTEVKERVRRLVEELERIVREVKKRVDEHKERNKRALEDVKRKVRDR

SEQ ID NO: 19336 - protein, 55 aa, Artificial Sequence
  Synthetic
EEVEKRARKTTEDIKRMADKVTKVAEEVLRRVEKVVEEVREVSRRVVEDIERDTR

SEQ ID NO: 19337 - protein, 56 aa, Artificial Sequence
  Synthetic
KDVEKVIEDIERILTEVRRHSKEILDRIKRILETIREIVKEVKKRNEDLLREARES

SEQ ID NO: 19338 - protein, 58 aa, Artificial Sequence
  Synthetic
KSVEDARRAVERVVREARRSNEEVKRAVEEVAKELERLVKESEDESRRIVEELKKTVD

SEQ ID NO: 19339 - protein, 57 aa, Artificial Sequence
  Synthetic
DEVEEVIKRIRDILRRVEEHSEKILREIEKLLRDATRHSEEVKRRNEKILRDAENSR

SEQ ID NO: 19340 - protein, 58 aa, Artificial Sequence
  Synthetic
EDVKRVRDEVKKVVERVRRSNKKVEDMVREVERRLRESNKESREDSKRIVEEMDRRVK

SEQ ID NO: 19341 - protein, 59 aa, Artificial Sequence
  Synthetic
SEVEKIIDELRKVAEEHKRRVKELVDTNRKVLKEVKDRVRDLVRRVREILKDVSDKARR

SEQ ID NO: 19342 - protein, 54 aa, Artificial Sequence
  Synthetic
EIKEVLKESEEEVRRMLEELEKELRRSRKTVEELLRRLDKTLREVEEAVKRERD

SEQ ID NO: 19343 - protein, 60 aa, Artificial Sequence
  Synthetic
DRVEELLKRVREILERVEREARRLVEEVEDVMRRHKEKLEELVRHNREVLREVSREARRT

SEQ ID NO: 19344 - protein, 55 aa, Artificial Sequence
  Synthetic
EEVKKVLKEVEDTVRELVRRLEKKLKESIDTVERLLEELERVLRESNKTVEDETR

SEQ ID NO: 19345 - protein, 59 aa, Artificial Sequence
  Synthetic
DEVRKILRELREALKRHVEEVKRLLEHNERVLKKVKEDVERLMEEVKRALEDVKRDVDR

SEQ ID NO: 19346 - protein, 55 aa, Artificial Sequence
  Synthetic
KEVRKVLRESEKLIDDLLRELKRVLEETNRRVEDLLRRLEEVLRRVEKTVRDRAK

SEQ ID NO: 19347 - protein, 57 aa, Artificial Sequence
  Synthetic
SLKERLEKVVEESLRRVEEVIKKLERRVEESERRVEELVKTLRDVLRKILRELEKEG

SEQ ID NO: 19348 - protein, 59 aa, Artificial Sequence
  Synthetic
RETVERLLEEIRELLERSRKNVEDLERRIDKLLEDSERNARELLERIRKELRDISEKRK

SEQ ID NO: 19349 - protein, 57 aa, Artificial Sequence
  Synthetic
SMKEEIDRVVREVAENVRDMIRRLKRVLEESLRRVDELVKEIKKVLDDVRRRIEEDG

SEQ ID NO: 19350 - protein, 59 aa, Artificial Sequence
  Synthetic
EETVKRLVEKIRELNERSLDNVKKLLDRIRELLEESERNVKDIVRRIRDLLRRIKEKAT

SEQ ID NO: 19351 - protein, 60 aa, Artificial Sequence
  Synthetic
DEVERVLEEIERMLREVEEHTRRVVEEVRRVLEEVKRHSERVVREIRRLLEELRKLVERG

SEQ ID NO: 19352 - protein, 59 aa, Artificial Sequence
  Synthetic
KDLVRKVEEEVRRVKRELERLNKELEDEVRRIEEAAKRSNEELKKVVDEVKRELEKASK

SEQ ID NO: 19353 - protein, 60 aa, Artificial Sequence
  Synthetic
DEVDEVLKEIRKVLEDVRKHSEEVLREIERVVREVKKHSRKVVEEIKEVVKRLEDLARRG

SEQ ID NO: 19354 - protein, 59 aa, Artificial Sequence
  Synthetic
KRLVDKVRKVVEEVERELKKSVDDVRRVVEEVERRLREVNKEVEDVVREVEERVRRAAT

SEQ ID NO: 19355 - protein, 57 aa, Artificial Sequence
  Synthetic
DEEKEVEKVVRDVEDKLRRLLEENRDVSRKIKRELEELLKELKRSVDDSKEKLERKL

SEQ ID NO: 19356 - protein, 56 aa, Artificial Sequence
  Synthetic
IKTVLEEIKKLAKEAEEEIKRTLERVKKLLEEVRRVVEELLRRNRTLLREIVRKAK

SEQ ID NO: 19357 - protein, 57 aa, Artificial Sequence
  Synthetic
DEERELEEVVKDIERRSKKVVEDNRRVSEEIKRRLEKLLEENRKSAEDSKEMLRREL

SEQ ID NO: 19358 - protein, 56 aa, Artificial Sequence
  Synthetic
VKTIVTEVRDVVRRDKKKAEDTVRTVKELLDRARKKVEKTIRDNRKVLEEVVRKAR

SEQ ID NO: 19359 - protein, 57 aa, Artificial Sequence
  Synthetic
SELERVEKVVREVKKALEDLLRRNKESVDRSRTEARRLLEELRESVRRSEEMVRRKL

SEQ ID NO: 19360 - protein, 56 aa, Artificial Sequence
  Synthetic
VEKVLKEIRDLLREAAERVERSIRRNKKVLDDLKEVVERLLKENERLLREIVEDAR

SEQ ID NO: 19361 - protein, 57 aa, Artificial Sequence
  Synthetic
SAREKLRKVVEEIRRELKRLLEENKKVSDDIRRKLDELLKELEKSVKESIDTLRRDL

SEQ ID NO: 19362 - protein, 56 aa, Artificial Sequence
  Synthetic
VDTIVKELRELLKRAEEEVKKTSDRVADLVRRAEEVVKKLLRENEELLRRIVETAR

SEQ ID NO: 19363 - protein, 57 aa, Artificial Sequence
  Synthetic
SEKEKVEKVVDEVRRRLEDLLRRNRESVRRSDEELKRLLKRNKEVSDEIRKRLRREL

SEQ ID NO: 19364 - protein, 56 aa, Artificial Sequence
  Synthetic
VKTVLREIRELLKEAEERVKKSIKENEDLLDDVRRKVEESTERVERELERVSREAT

SEQ ID NO: 19365 - protein, 57 aa, Artificial Sequence
  Synthetic
DEDREVEEVVKEVEERLRRLLKKNEDVSREIEKRLKELLEKNKRSVEKSEEMLRRKL

SEQ ID NO: 19366 - protein, 56 aa, Artificial Sequence
  Synthetic
VDRVLEEIRELLKRVKEEVERTSRDVKEVLRRAEEEAKRTDDENRKLLEEVVEKAR

SEQ ID NO: 19367 - protein, 60 aa, Artificial Sequence
  Synthetic
DRSKEVVDRLEEELRKVKEDSKESVDRLRRLLEEVERRAEKSLRDSKEVLRRVKEEAERD

SEQ ID NO: 19368 - protein, 55 aa, Artificial Sequence
  Synthetic
RELEKVVRDIIDRVRKMLETSEEVIREVLERVRKVLEENRRVNKDIIDKVEERVR

SEQ ID NO: 19369 - protein, 60 aa, Artificial Sequence
  Synthetic
DEIERLIEEIKTVLDEIRKEAKRMIDENKRLLDEIRELSERVVEENRRLLEEIRDRAEKR

SEQ ID NO: 19370 - protein, 59 aa, Artificial Sequence
  Synthetic
KELADELRKVLKDVRREIEKLVRDAEKSNEDSRREVERLVKRNRESLEEIRKRVEDLVK

SEQ ID NO: 19371 - protein, 57 aa, Artificial Sequence
  Synthetic
SSKETLRKEVERLEKELKKLVDESRRVLEEVEREVRRAVRELEESVKKSAKRLRDRV

SEQ ID NO: 19372 - protein, 56 aa, Artificial Sequence
  Synthetic
VEKLIRRVEELLERVRELVKKNIREIEELLERLRRLVEKVIEDDKRMLKEVEEEAN

SEQ ID NO: 19373 - protein, 61 aa, Artificial Sequence
  Synthetic
REVEELIKRIERLLDEAREHSKEVIRRDEELLRRVRKIIEEIIREIERLLREAEDIARKRG

SEQ ID NO: 19374 - protein, 59 aa, Artificial Sequence
  Synthetic
EELLKRIEDVVRRVVEDLKRLNEEIRRSSEETEKELRRLLEEIRKVVEDVERRVRELVK

SEQ ID NO: 19375 - protein, 61 aa, Artificial Sequence
  Synthetic
DEVREVIKAIRKMLEEAEKHSRDVIRADKELLDKIARHSEEVIKEIRRLLRELEKIAKDKG

SEQ ID NO: 19376 - protein, 59 aa, Artificial Sequence
  Synthetic
EDLLRRIEEEVRRVVEALEKLNRDIEESSRRTEDTARKLNERIREVVEEVMRRVRKLVE

SEQ ID NO: 19377 - protein, 61 aa, Artificial Sequence
  Synthetic
SEVERVIEEIRKLLEDAKRHSDEVIKTDEDILRKVKKHSEEVIREIEKLLEEIEELARRRG

SEQ ID NO: 19378 - protein, 59 aa, Artificial Sequence
  Synthetic
EELLRRLEKLVEDVMRTLKKLNDEIRKSVDETEKTLEELNRRIRKTVEEVRKTAEDLVR

SEQ ID NO: 19379 - protein, 61 aa, Artificial Sequence
  Synthetic
DEVREVIRRIEKLLEDVKRHSERVIREDRKLLRDAERRAKEVIDEIRRVLEEAKEIVRREG

SEQ ID NO: 19380 - protein, 59 aa, Artificial Sequence
  Synthetic
EELLKTITDVVRKVEETLKKLNDEIRKSVEDTMRALKKLVDDLRRVVKEVEDRVREEAR

SEQ ID NO: 19381 - protein, 61 aa, Artificial Sequence
  Synthetic
DVVREVIKTIKKILDEVRDHTRRSIERNEKLLRDIRKIVEDSIRRNRKLLDDAKKVAERDL

SEQ ID NO: 19382 - protein, 59 aa, Artificial Sequence
  Synthetic
EEMVKTLKKVVEDVERELRRLNKEDEDTVREIAEAAERLVRDDERTVREIEEALKELVR

SEQ ID NO: 19383 - protein, 61 aa, Artificial Sequence
  Synthetic
DVIRDVEKKIRDILERVREHTKKSIKENRDILDDVRRHTEKSIKENEDILDEVRRVAERDL

SEQ ID NO: 19384 - protein, 59 aa, Artificial Sequence
  Synthetic
EEMVKRAKDVVDDVARRLEELNREDKKTVEEIVETAKELNERDKETVERIRKKLEDLVK

SEQ ID NO: 19385 - protein, 61 aa, Artificial Sequence
  Synthetic
DAVRKVIEDIKRALEEVRRHTKESIKRNEDILREVEKIARDIIREIRRILERVREVVERDL

SEQ ID NO: 19386 - protein, 59 aa, Artificial Sequence
  Synthetic
EEAVETLKRVVDDVAKKAKELNREDEETVRKIVEELKRLLDELRREVERVADEARRAVK

SEQ ID NO: 19387 - protein, 61 aa, Artificial Sequence
  Synthetic
SVAEEVIRRIEEILKRVEEHTRESIERNKKLLEEVRKHTEDVIRRIRELLERLERVVRRDL

SEQ ID NO: 19388 - protein, 59 aa, Artificial Sequence
  Synthetic
EEMVKRVKDVVDDVVRRLKDLNETDRRTVDEIVKEARRLNDELRKVVEEVEEKARRDVK

SEQ ID NO: 19389 - protein, 59 aa, Artificial Sequence
  Synthetic
DEVREIIERIKKLLDDIRKVAEESIRRNEKLLEEVRKRVRESIEELKRIKEEVEKLARE

SEQ ID NO: 19390 - protein, 59 aa, Artificial Sequence
  Synthetic
EDVVRTIEEVVRRVEKELRRLLEENERVIREIERELKKLVDDNKRVSDEIKDRAERLVD

SEQ ID NO: 19391 - protein, 59 aa, Artificial Sequence
  Synthetic
SEVEDIIRKIEESARRSEKVVRDSIRENRRLLEEVKREVDRSIERLEDIIRKVEEVARR

SEQ ID NO: 19392 - protein, 59 aa, Artificial Sequence
  Synthetic
ERAVDTIRRVVEKSKTVSKKVLDENREVVREVDERVRELVRKNEDVSRKIEERARRLLK

SEQ ID NO: 19393 - protein, 59 aa, Artificial Sequence
  Synthetic
DEEEEVERVVKEAEETIRELLERDKRVVKRLREEADRVLDEVREEVKRSEETAEDLRRK

SEQ ID NO: 19394 - protein, 56 aa, Artificial Sequence
  Synthetic
GEKLIKELEDVLRELEERSRKTLEELKDVLRKVKETIDELIRTNRRELEKLERDTR

SEQ ID NO: 19395 - protein, 59 aa, Artificial Sequence
  Synthetic
SEEEEVAKVVEDVRRRLEELKRAVEEVIRRTDEEAKRLLEADRRVVERVREEVKRLVEA

SEQ ID NO: 19396 - protein, 56 aa, Artificial Sequence
  Synthetic
GKELIKRLRDELKRLEDDARRILERNKKILEDVERESRRTLKELKDVLKELEERAR

SEQ ID NO: 19397 - protein, 60 aa, Artificial Sequence
  Synthetic
SLVEELERVVKDVEREARKLNEHNRENSKRVEDRLRELNEHLRKNTEEVKRRLEELIRKK

SEQ ID NO: 19398 - protein, 59 aa, Artificial Sequence
  Synthetic
EDAIREVLRRIERLLEEVKKKNEETSKRSKELLEENAKRNKEVSDRSKRLLEEIKRRAD

SEQ ID NO: 19399 - protein, 60 aa, Artificial Sequence
  Synthetic
SLTERLREVVRRVEEELKELIRHLRENSERVRKTLEELNRHLKENVEDVKRKLEDLIRKK

SEQ ID NO: 19400 - protein, 59 aa, Artificial Sequence
  Synthetic
KDAVERVIEEIERLLDEVKKTVEELSKTSKKLLDENKKENEDVSRKSEELLKKIADEVK

SEQ ID NO: 19401 - protein, 60 aa, Artificial Sequence
  Synthetic
SLKERLEEVVRRVRKELKKLIEHLERNVEEVRKTLEELNRHLDENVKRVKDTLTRLIEEK

SEQ ID NO: 19402 - protein, 59 aa, Artificial Sequence
  Synthetic
KDEFERVLKRIKEVLDEVKREVEELSKESEDLLRKNEERNKRASDRSEDLLKKIAEEVK

SEQ ID NO: 19403 - protein, 60 aa, Artificial Sequence
  Synthetic
SLLEELEKVVEEVKRSLDEVNKRNKKNTDDVAKTLTDLNEHLERNVRKVEEDAKDLVRKK

SEQ ID NO: 19404 - protein, 59 aa, Artificial Sequence
  Synthetic
EKLAKDVLREIRRVLEEVKRDNDRTSKESKDLLDENKKRNEEVSEESERLLRDIARKVD

SEQ ID NO: 19405 - protein, 60 aa, Artificial Sequence
  Synthetic
DLLEELKDVVDKVRRTLERLNEENRKNVEDVKRRLDDLNRKLEDNVRRVEERARELIKRK

SEQ ID NO: 19406 - protein, 59 aa, Artificial Sequence
  Synthetic
EKAVRDVLKEIEELLRKVTKENKDTSDESRRLVKTNEDLNREASKRSEDLLARVEEKVR

SEQ ID NO: 19407 - protein, 60 aa, Artificial Sequence
  Synthetic
SLTERLAEVVKRAEDLLRKLNEENKKNVEDVERTLRKLNKDLKDSVDRSRREAEKLIRRK

SEQ ID NO: 19408 - protein, 59 aa, Artificial Sequence
  Synthetic
KDAIEKVLEDIERVLREVEKRNRETSRDSERLLRRNEEENRKALERDEKVLKEVADEVE

SEQ ID NO: 19409 - protein, 60 aa, Artificial Sequence
  Synthetic
SLEEALEKIVREVKETLERLNKENRDSVRETADTLRKLNEELRRNVKRVEEALRDLIREK

SEQ ID NO: 19410 - protein, 59 aa, Artificial Sequence
  Synthetic
EEEAKRVLRKIEEDLKRVADINRKTIERDKKLLEDNERKNRKVSEESRELLEKIAKDVK

SEQ ID NO: 19411 - protein, 60 aa, Artificial Sequence
  Synthetic
KEVEEIIEEIKDRLRRLEETVERLLRENREMLRRTREEVKEIIKRIRDLLRELKKIAEKD

SEQ ID NO: 19412 - protein, 59 aa, Artificial Sequence
  Synthetic
KKLVEDVDKVVKEVEDRVRRLIEALKKVSEDLHRENKKLIEELEEVVKEVKERARELTR

SEQ ID NO: 19413 - protein, 60 aa, Artificial Sequence
  Synthetic
DEVKEIIKRIEDLLEDLKRKVERILREDERSLEESRKKVEEILKEIEDVLRKLKKDVEED

SEQ ID NO: 19414 - protein, 59 aa, Artificial Sequence
  Synthetic
ESAIKELRDVVREVKKRAKELIERLRESVERSRETNERLIRELEDVVRRVEETVRRLIK

SEQ ID NO: 19415 - protein, 60 aa, Artificial Sequence
  Synthetic
KKEEKIKRSVERSKEENERLIEELERSIRDTARRAEKLIERLEKVVREVDKRLRELREEG

SEQ ID NO: 19416 - protein, 56 aa, Artificial Sequence
  Synthetic
VETVLREDEDTLRRSEEKVDKLIKDDRRLLEELEDKVRELLRTVKELLKRTEERVT

SEQ ID NO: 19417 - protein, 60 aa, Artificial Sequence
  Synthetic
SSEERLKESIDRSKKRNKEAIEELEKSIRETEKTLEELIKTTRKSIEDVRKRLEDLERKG

SEQ ID NO: 19418 - protein, 56 aa, Artificial Sequence
  Synthetic
IDTLIEEDKETLRRSDEEVRRLIDEDRRLLEEVEKRARESNKEIRDLLRRVEEEAR

SEQ ID NO: 19419 - protein, 60 aa, Artificial Sequence
  Synthetic
SEEDELRESVKDSERRLRRLIEEDKRVVEEVEEENKRLIDKVREVIKRIEDRLDELRRRG

SEQ ID NO: 19420 - protein, 56 aa, Artificial Sequence
  Synthetic
VKEAIRRDRELLKRAEEESRRTLEEMRTSLEESKRRVEELIKTLKRLLDEAEKEAK

SEQ ID NO: 19421 - protein, 60 aa, Artificial Sequence
  Synthetic
SSEEKVEESIRRSKKRLEELIRDVERVVRKVEEDNRRLEEKLRKSIEDTRRKLEELKRRG

SEQ ID NO: 19422 - protein, 56 aa, Artificial Sequence
  Synthetic
FETLIRDDKRLLRKVEEDAKRLIKEIRDSLRESEKRVEELIDRDRRLAKEVEDRAR

SEQ ID NO: 19423 - protein, 59 aa, Artificial Sequence
  Synthetic
SSEERLRESIKRSKKRLEELIREVRKRIEEIRRKNEELIREVEEVIRRIREELKRLRDE

SEQ ID NO: 19424 - protein, 56 aa, Artificial Sequence
  Synthetic
IDELIKEDERLLREVEKKVKEIIKRLDDSLRDSERRAKELIRELEELLREAEERAK

SEQ ID NO: 19425 - protein, 59 aa, Artificial Sequence
  Synthetic
SSEDRLRKSIEDSRKRNEELTRALETVIREIRKRNARLIEEVKKVVEEVKRELERLREE

SEQ ID NO: 19426 - protein, 56 aa, Artificial Sequence
  Synthetic
IDTLIKRDRETLKESEDRVRKLLEDLRRSLRESEKEARRLIEEIRTLLEKVAREAT

SEQ ID NO: 19427 - protein, 56 aa, Artificial Sequence
  Synthetic
SEVEDVLRRIRELLEEVRELVERNLKEIKRLADEIERLAKENLERSRRLAEELRDG

SEQ ID NO: 19428 - protein, 59 aa, Artificial Sequence
  Synthetic
EDAVERVERILRDADEKIKELARESERLNRELDELIKRLVDESRELNRELEEIVRERAR

SEQ ID NO: 19429 - protein, 56 aa, Artificial Sequence
  Synthetic
REVEEVLKKIEDLARELTKKVRKNLEDIKKLAEEIRELAERVLRTSRELIKELRDG

SEQ ID NO: 19430 - protein, 59 aa, Artificial Sequence
  Synthetic
RELLEEVRKILEEMRRRVDELVRRSEELNRKLRELVERLVKELEDLNDEAKKIVDDRAR

SEQ ID NO: 19431 - protein, 56 aa, Artificial Sequence
  Synthetic
REVEEILKKIRTLLEEVKRRVEKNLEDIRKLLKELEDRVRRDLDEIRRLAEELRDG

SEQ ID NO: 19432 - protein, 59 aa, Artificial Sequence
  Synthetic
EKLLAEVRKVLKEAEDKIRELVERSKTINTEVKKEVDRLVEESKKLNKELEDEVDRRAK

SEQ ID NO: 19433 - protein, 56 aa, Artificial Sequence
  Synthetic
REVEEVLKKIRELIETLEELVRDDLRRIEELLRRIEDKVRENLRRIREVIKELRDG

SEQ ID NO: 19434 - protein, 59 aa, Artificial Sequence
  Synthetic
EDLLKRVKELLDDIRRKVDELIDRSRRLLEDLRRRVKELAEESKKLNEEAEKIVEDRAR

SEQ ID NO: 19435 - protein, 56 aa, Artificial Sequence
  Synthetic
KEVEEVLKEIKDIAEEIRELAERDLKRDKELVDEAEDLVRRNLEDIRRVIEELRDG

SEQ ID NO: 19436 - protein, 59 aa, Artificial Sequence
  Synthetic
EELLRRVEKLLEDLKRTVDEMVKRSEDSLRRSEETVRELEERSRRLNDEIRRIVDERAR

SEQ ID NO: 19437 - protein, 58 aa, Artificial Sequence
  Synthetic
SEVDKVVKEIKEKLDEIRKEVEKVVREDERLLEEIERLARKVVRENKELLKDIRREGR

SEQ ID NO: 19438 - protein, 59 aa, Artificial Sequence
  Synthetic
ETVARKLEEVVREVEEEVRRLEEKLKRSVEETEREIRRVVKELEDSVRETEREVRRLSK

SEQ ID NO: 19439 - protein, 60 aa, Artificial Sequence
  Synthetic
DDVEKLVRDIERLVEKVTRDNKKTVDDDKTLVDEARKENEETVERIKRELEELEKRVRKD

SEQ ID NO: 19440 - protein, 60 aa, Artificial Sequence
  Synthetic
SEEATRKLEKVLRDLEEELKRVDRENEKSLRESRKIVEDLDRTNKRVVDELRRIVEELRK

SEQ ID NO: 19441 - protein, 60 aa, Artificial Sequence
  Synthetic
DEIDDVLRKIEDLVRKLRELVKKVLEDSKRLLEEIKRLAKEALERSEELVRRVEELARRG

SEQ ID NO: 19442 - protein, 59 aa, Artificial Sequence
  Synthetic
EEVIRKLEEAVKRAEELVKRIEEELRKVDEEVERLVREIEKELREVNDRLRRLIEEIAR

SEQ ID NO: 19443 - protein, 61 aa, Artificial Sequence
  Synthetic
REIEEALKEIEKIIEDLRKIVEEVLKRLEEIDRELRKRNEDSNREIEKIIEDLKDMVRKKG

SEQ ID NO: 19444 - protein, 60 aa, Artificial Sequence
  Synthetic
SEEAERRAETVLRKLERVVDKVIKDIRKVLKDNERVVREVRKSAEELLDKLRKVVEEVRR

SEQ ID NO: 19445 - protein, 61 aa, Artificial Sequence
  Synthetic
REIEDVLRRIEEIIRELEERNKKSNKEIAEIDKELRDRNRKSNEEIEKIIEDLKEAVERKG

SEQ ID NO: 19446 - protein, 60 aa, Artificial Sequence
  Synthetic
SEEAEKRIRDVLDKLREVVERVIRSIEDMLRRNEKVVREVKESIERALKRLEETVKRVRD

SEQ ID NO: 19447 - protein, 61 aa, Artificial Sequence
  Synthetic
DEIEKMLRDIEEIIKRLRKIVEEVRDTLRRIDEDLRRRNEESNRRLEKIIEDLERVARRDG

SEQ ID NO: 19448 - protein, 60 aa, Artificial Sequence
  Synthetic
DKKAEDEIRKALRKLKEVVKKVLKEIAEMVERNDRELRRLEKSIRESLDKLRETVKRLED

SEQ ID NO: 19449 - protein, 57 aa, Artificial Sequence
  Synthetic
DLVEEIRKTIEKIVREIRKVLDEVRKHTEDVIRDIRRVLKEVERHSREVVKRIRDER

SEQ ID NO: 19450 - protein, 56 aa, Artificial Sequence
  Synthetic
KDELRKLVETLEKVVREVEEELRRLNEELEKVVREVEKRARESNDRLEKVVREVER

SEQ ID NO: 19451 - protein, 60 aa, Artificial Sequence
  Synthetic
SEVDEVVKEIRKLVEDDEREVEKAIRDIRRSNEELRERVERLLEELERLIKEVEETVRRM

SEQ ID NO: 19452 - protein, 58 aa, Artificial Sequence
  Synthetic
EAVEKARKILEEVEKVVTDTEKKLDDIRKHVKEVVDRLRKEIEDVLKRVRDVAERERR

SEQ ID NO: 19453 - protein, 60 aa, Artificial Sequence
  Synthetic
KVEELLKELLDRVKEVVDRIRRELEKALEESRRVVREVEERVKTANREVRKVVDDVRKRS

SEQ ID NO: 19454 - protein, 59 aa, Artificial Sequence
  Synthetic
EEDVRRVLEEIARLVRELEKMVRDVVKTSRDTVRKLREDVKKVVDENRKLAEKLKRDAD

SEQ ID NO: 19455 - protein, 60 aa, Artificial Sequence
  Synthetic
RIRETLTKLLEDVKEVVRETDELLKRLNRRVREVVRETEERLEDLNREVRKVVRDIERET

SEQ ID NO: 19456 - protein, 59 aa, Artificial Sequence
  Synthetic
EETVKDIVRKVKRLLEENRKLAEKITRDNEELLKENKEMLDEVRRRNTELLKRLREEAK

SEQ ID NO: 19457 - protein, 60 aa, Artificial Sequence
  Synthetic
RIEEDATRLIKEVKDVVKETEERARKVNKEVRDVVRDVERRLKELNEEVERVIRDVKRRS

SEQ ID NO: 19458 - protein, 59 aa, Artificial Sequence
  Synthetic
EKIADDVAKEIEDLVRRNREVVTEIEKKNRELVRRLRDMVRKVEEDNKRLLEELKKATD

SEQ ID NO: 19459 - protein, 60 aa, Artificial Sequence
  Synthetic
SVRELVEEARKHSRKVAEESRKLVEDLTEESKRVIDESREKVERLREEIERVLREVKKEG

SEQ ID NO: 19460 - protein, 56 aa, Artificial Sequence
  Synthetic
IERVLEEVEESDKRDEERVRKLEREIRESNKRDKEIVDRLLDELRRIVEELRERAR

SEQ ID NO: 19461 - protein, 59 aa, Artificial Sequence
  Synthetic
SVDEAVDELLKNSEEVIKDTERKARELLRHSREVNKRSERESERLKEEIERVLRKLKRD

SEQ ID NO: 19462 - protein, 56 aa, Artificial Sequence
  Synthetic
IEELVERIKDSNRRDKEIIKDLERKIRESDKRHKERVDDLARRVEEIVKELEEAAR

SEQ ID NO: 19463 - protein, 57 aa, Artificial Sequence
  Synthetic
SEVKKVEKEAEDISRRSRELLEKIREEVERLSRRSEELLKDVERKVRKVIKEIEDKR

SEQ ID NO: 19464 - protein, 56 aa, Artificial Sequence
  Synthetic
EETVRELIRDLRRNTKRVKEEADEMIRHLRENTERVEKRLRELREELKKVVERVRK

SEQ ID NO: 19465 - protein, 57 aa, Artificial Sequence
  Synthetic
EMVDRATEKVRTLSDESRRLLKKVRDENRKTSERSKRLLDEIERRVKEVLKRIRTER

SEQ ID NO: 19466 - protein, 56 aa, Artificial Sequence
  Synthetic
KDRVKRLIEELKENTERVEKSLRDLDRHNRRNTEEVKRSADELIEELKRVVDEVKK

SEQ ID NO: 19467 - protein, 57 aa, Artificial Sequence
  Synthetic
DKADEIEETVRRVSETSERLVEEVRKDNERTSKRSDDLLKDIEDKVRKVLERMRRER

SEQ ID NO: 19468 - protein, 56 aa, Artificial Sequence
  Synthetic
EEKVRRLIKELRDNTKKVAEELKKLDDHNERNVEEVKKRLEELIRRLEKVVEDVKR

SEQ ID NO: 19469 - protein, 57 aa, Artificial Sequence
  Synthetic
DFVKKAKDDVKEVSKESEKLLREIEEEVRRVSKRSRELLETVRRRVEKVLRDMERER

SEQ ID NO: 19470 - protein, 56 aa, Artificial Sequence
  Synthetic
EDRVRELIKELEENTRRVEEKLRKLIEDLKRNVREVEERARRLIEELREVVERVKT

SEQ ID NO: 19471 - protein, 60 aa, Artificial Sequence
  Synthetic
SDLERLKREAEELIERDKRLLRRVEEESRRTLEEDRRSLKESEDRARELIRRIEELAKKI

SEQ ID NO: 19472 - protein, 59 aa, Artificial Sequence
  Synthetic
DEMRDAARRLIEEITRSVEESERELKRLIEEDKRSVERSKKENDKLIEEVRRVVERVTK

SEQ ID NO: 19473 - protein, 60 aa, Artificial Sequence
  Synthetic
DVEEVLRKLKKEVEEVIRRTEAEVAKVLKEVEKVVTETREEVRRVLEEVKRVVDDVRRRN

SEQ ID NO: 19474 - protein, 56 aa, Artificial Sequence
  Synthetic
VEEVRKTVEKLIDDNRRMLEEVVKRAKELIEHNRRVVDKVLKEAKKIVRDLEETVR

SEQ ID NO: 19475 - protein, 60 aa, Artificial Sequence
  Synthetic
SVEEVLKKLLEEVRRVAEETRRRAEKLLDDDRKVAEESKKRAEELLKEVKDRVDDVRRRN

SEQ ID NO: 19476 - protein, 56 aa, Artificial Sequence
  Synthetic
MEKVARTIKKLIKENRKFLEEVEKRSRETLKTNKKVLRDLEKRAKKIIEDLERTLR

SEQ ID NO: 19477 - protein, 57 aa, Artificial Sequence
  Synthetic
KIEELMKRLEDEAKRSLDESEKKLEELRRDSERSVREVEELLKELLDRARRVLEKLG

SEQ ID NO: 19478 - protein, 59 aa, Artificial Sequence
  Synthetic
EEEVKRVAREVEELIERNRRHSDRIAEEVKETLERNREKVRRVLEKLKKELEDVLEKRK

SEQ ID NO: 19479 - protein, 56 aa, Artificial Sequence
  Synthetic
DIEELARRLEEAVKDSLRRVEEKLRRLEDESRRSVEDSDRKLKELIDRVRKVLKDL

SEQ ID NO: 19480 - protein, 59 aa, Artificial Sequence
  Synthetic
DEVVRRVARRIEELLKENDDLVRRVAEEIKRTLKENNEHSDDLRRRIEELIKEITERRR

SEQ ID NO: 19481 - protein, 56 aa, Artificial Sequence
  Synthetic
DIEELLERLRRRVEKSLEDSDRLLRKLEEDSKESVKRVKRLLEELIKRVKEVLKKA

SEQ ID NO: 19482 - protein, 59 aa, Artificial Sequence
  Synthetic
KELVKRALEEIEKRLKDNRDHSRRLAETVKDTLDKNDKKVEEVRREIEELLRRLDEKRN

SEQ ID NO: 19483 - protein, 56 aa, Artificial Sequence
  Synthetic
DIEDLLRELRKRVEDSLKKSEDRLRRLEEKVKRSLDEVEKELKRLLDEAKKVVDKA

SEQ ID NO: 19484 - protein, 59 aa, Artificial Sequence
  Synthetic
DEEVRRVLERIDRLIKRNDDHSRKLEKEIEDLLRRNNREAEEVAKEVEKLLEDLERRRK

SEQ ID NO: 19485 - protein, 60 aa, Artificial Sequence
  Synthetic
REIEEVVKELDDLLRRNDERVKRILDELEELIKKHDRRSDEVTKEIRELLRKLEREVERD

SEQ ID NO: 19486 - protein, 59 aa, Artificial Sequence
  Synthetic
KEARELAEELKKRAKESVDRSKKALEELKKRAREAVRRSREKLKKLKREVEKVVREVRR

SEQ ID NO: 19487 - protein, 60 aa, Artificial Sequence
  Synthetic
DELREILERVRRVLERSKELSEELLRRVEEVLRRLRKHSRDLEEKVRRILTEIEKRARER

SEQ ID NO: 19488 - protein, 59 aa, Artificial Sequence
  Synthetic
KDLREKLDKLRRDLEEVLRRNEEIVREATRRIRKVLDENRKKVEELKRRAERVLEELRR

SEQ ID NO: 19489 - protein, 60 aa, Artificial Sequence
  Synthetic
DDLRRIAKEVEKVLKTSEDLSEELKKEVKRVVDESREDSKRLREEVRKVLEEVKRLADRN

SEQ ID NO: 19490 - protein, 59 aa, Artificial Sequence
  Synthetic
RELKEILKELKKELERVLEDNRRKVKELEDELREVLKRNEKIARELEKELRRVLEEVRR

SEQ ID NO: 19491 - protein, 60 aa, Artificial Sequence
  Synthetic
DELRELEERAKKVVDESRENSDRLAKKVKEVLKRSRELSDELRKEVERVLREIKERARRK

SEQ ID NO: 19492 - protein, 59 aa, Artificial Sequence
  Synthetic
ERLRDILDKIAREVERVLEENRRIVTELKKELEKVLDENRKIVEELERRARKVLKELRD

SEQ ID NO: 19493 - protein, 60 aa, Artificial Sequence
  Synthetic
DELRELLEEVRRMLRESRENSRKLAEEVERVLRESEEDSKKLKRDVEKILEDVRRKLERN

SEQ ID NO: 19494 - protein, 59 aa, Artificial Sequence
  Synthetic
DELRRILDELRRRAKKVLDDNRKIVRDLERELRRVLEENRKIVEELEKLLEKVLEELRR

SEQ ID NO: 19495 - protein, 60 aa, Artificial Sequence
  Synthetic
KELEELAKTVEDLLRENDRLAEEVLRTVDDLLRKNDEISKRLLDTARKLLKELKDLKREN

SEQ ID NO: 19496 - protein, 59 aa, Artificial Sequence
  Synthetic
EDVKRILEKLIRDVEKSLKDVDDRLRELIRRVEESLRRNEEILKEVERRAEEVVEEVRR

SEQ ID NO: 19497 - protein, 60 aa, Artificial Sequence
  Synthetic
DDAERLLEDVRRLLEENDRISEEVLKTVKRIVDENDRLAEELLRTVDELVKRLKELRERN

SEQ ID NO: 19498 - protein, 59 aa, Artificial Sequence
  Synthetic
ERIRKILEKVIKEVEDSLRRNSEIVERAVDRARESVKRVKEIVETVERKIRKVVDEVRK

SEQ ID NO: 19499 - protein, 60 aa, Artificial Sequence
  Synthetic
SEVEEVKDRVTKLLKENDDISKELEERVRRLLEENDRHSREVEKTVRKLLEDLKRLAEEN

SEQ ID NO: 19500 - protein, 59 aa, Artificial Sequence
  Synthetic
KRVKDILRRLVEEAEESLRRNEKKLRELEKRVRESLKRSHKINKELEERVKEVLDRVRD

SEQ ID NO: 19501 - protein, 60 aa, Artificial Sequence
  Synthetic
DEVERVLEEAKKLLDTNDDLLRKLDDTVRKLVEDNNRISEEVRERVERLLRRLEELVRKN

SEQ ID NO: 19502 - protein, 59 aa, Artificial Sequence
  Synthetic
ERVKRILDRVIKEVTDSLKRVEDRLRELIRRVEESLKRNREELRRLEERVKDVLDKARR

SEQ ID NO: 19503 - protein, 60 aa, Artificial Sequence
  Synthetic
DRLEDLLRDVKRLLEENDKHSKEVEERIRKLVEDNNEISRTVARDVEEKLKRLRERTEEK

SEQ ID NO: 19504 - protein, 59 aa, Artificial Sequence
  Synthetic
ERVRRTLEELTRRVEESLKRSHEINRKVIREIEKSMDENKKELERLIDRARRVLEDVRK

SEQ ID NO: 19505 - protein, 60 aa, Artificial Sequence
  Synthetic
SEAEEVLKRAEEILRENNKISRDLEEEVRRLLKENDDLLREVEETVERLLEELKELAKRN

SEQ ID NO: 19506 - protein, 59 aa, Artificial Sequence
  Synthetic
ERVKKILERVIRELEKSLKDNERKLRELEERVRDSLRRVEESLRRLERRVEEVLERVRK

SEQ ID NO: 19507 - protein, 60 aa, Artificial Sequence
  Synthetic
DEMEKLRKDVKKLLEDNNKISRDVEKTVEELLRRNDEHSKEVLKRVEDLLRELKKLKDDK

SEQ ID NO: 19508 - protein, 59 aa, Artificial Sequence
  Synthetic
EDVKRILEELKKRAEDSLRENEKRLRELIREVEKSLRRSHEINRDAERKVRKVLDDVRR

SEQ ID NO: 19509 - protein, 58 aa, Artificial Sequence
  Synthetic
SEIEELLERVKELLKRNRELVERVKRTVEELNKDNDRVVKEIEDEARRLLDELEKIMR

SEQ ID NO: 19510 - protein, 59 aa, Artificial Sequence
  Synthetic
DRMRRIAKKAIDDVRKSVEDSKRILDELRKSTEESVKRTRDILKRVLDEAKKVVEDLRR

SEQ ID NO: 19511 - protein, 60 aa, Artificial Sequence
  Synthetic
DELEELRTRVEKLLKENNDLVREVLKTVKKLNDENRKLVERILREVERLLRELREIAKTT

SEQ ID NO: 19512 - protein, 59 aa, Artificial Sequence
  Synthetic
EEMRKKAEELRKRVDESVKDTRKKLEELRKSTEKSVRDTDRILKDLERRAREVVDELEK

SEQ ID NO: 19513 - protein, 60 aa, Artificial Sequence
  Synthetic
DVEEAVRELRETLDKSVERSERTVRELVKKLETSVEETREEVERVVEELDRVVEEAKKDV

SEQ ID NO: 19514 - protein, 55 aa, Artificial Sequence
  Synthetic
KEVRKEVKELVERDEDLVRKIREKVEKVVKDNKDLLRRIREAAKRVVREIRERLR

SEQ ID NO: 19515 - protein, 60 aa, Artificial Sequence
  Synthetic
STMDEIRRIVEKVLKEDKDLAETADRLNRDSVRRDEELAERNKRTNERVVREIEDRLKKE

SEQ ID NO: 19516 - protein, 59 aa, Artificial Sequence
  Synthetic
KRLEDIVREVKKRLEDSLRDTERIVREVDERNKESLRRSKEIVERVNKLLRDVLERART

SEQ ID NO: 19517 - protein, 61 aa, Artificial Sequence
  Synthetic
SSKEVADELRKKAEKVLDELRKIIRELERKNEDSLRRTEEIVRRLEEEAERVLRDLVRTRG

SEQ ID NO: 19518 - protein, 56 aa, Artificial Sequence
  Synthetic
IEDLRRTVDKLVEEIKDLARKLAKSSDDTVREDEKLVEELRKDVKRIVRKIKKDLE

SEQ ID NO: 19519 - protein, 56 aa, Artificial Sequence
  Synthetic
SAEEVVRELDKELKKVLEDSRDLVRRLEEELRKVLEDNEEVVKEIERSSDDVLRKL

SEQ ID NO: 19520 - protein, 55 aa, Artificial Sequence
  Synthetic
DELLRRVKELVERARRHSERLLEEVKRLVDEIRERSKELLERARRLNEEMKERTR

SEQ ID NO: 19521 - protein, 60 aa, Artificial Sequence
  Synthetic
SDLEELFREVKELVDDNLRKSDKLRRDVEKRVRDNERRSEKVHEDNRRLIEKIERLVRRG

SEQ ID NO: 19522 - protein, 59 aa, Artificial Sequence
  Synthetic
DRVRTLVKELRERAKKSLDDNRRMVEELRKRLEESLRRNKRVVEESEKIAKEVLDKVRT

SEQ ID NO: 19523 - protein, 60 aa, Artificial Sequence
  Synthetic
KDAEDLERRVRELVEENNRVSKRLAEEVTRLVKENEDKVRELEKEVRDRAKELLDMKRRG

SEQ ID NO: 19524 - protein, 59 aa, Artificial Sequence
  Synthetic
ERLKKLVDELRETLERSLRENEKVADELRKRAEKSLEDVKRVVDELRKIVDDVLKRVED

SEQ ID NO: 19525 - protein, 60 aa, Artificial Sequence
  Synthetic
DDLEELFERVKRLLERNNEVSKKLEDDVRKLIEDNERRVERVHRENEKELRRIEDLKRRG

SEQ ID NO: 19526 - protein, 59 aa, Artificial Sequence
  Synthetic
ERVRRLVEELRKLLEDSLEKNKRLVDELRKRAERSLREVRKLVERSKREAERVLEEVRK

SEQ ID NO: 19527 - protein, 60 aa, Artificial Sequence
  Synthetic
SRVEEMFERIERLVRRNNEVSRRVHERNRELIKRNREKVKKVHDDNKKLIDDLRELKRRG

SEQ ID NO: 19528 - protein, 59 aa, Artificial Sequence
  Synthetic
ERVRRLVEEARRLLKKSKDDNRRVVKRSREEVTRSLREVEKLVDESRREAEKVLEEVKK

SEQ ID NO: 19529 - protein, 60 aa, Artificial Sequence
  Synthetic
KELEEAFDRVRRLLEENKRKAEEVHRTNEELVRRNNEKSERVHRENEKEIERLDRAKKRG

SEQ ID NO: 19530 - protein, 59 aa, Artificial Sequence
  Synthetic
ERVKTLLKELRDRLKESRETVKELVDRSREEVKKSKKRNKKVVTDSRRRIKDVLDKVRK

SEQ ID NO: 19531 - protein, 60 aa, Artificial Sequence
  Synthetic
KEAEDMLRKVRKLIKENEKHSREVADEVRKLVEDNDRKVDEVHERNRKLITDLRRLAEEG

SEQ ID NO: 19532 - protein, 59 aa, Artificial Sequence
  Synthetic
ERLKTVVTELEKRARDSLEKSKEINKRLREELKRSEERVERLVRKSEEEAKKVLDDVRR

SEQ ID NO: 19533 - protein, 60 aa, Artificial Sequence
  Synthetic
SEIEKLVEDVRKLVEDNLRHSEEVHRRNRRLIEENERKIDELEKRVRKLVEELRELAERG

SEQ ID NO: 19534 - protein, 59 aa, Artificial Sequence
  Synthetic
ERVRTLVDRLREELKRSLDESEKLNRESRKRVTRSLEKVDDLVRELEKLARKVLEEVKT

SEQ ID NO: 19535 - protein, 60 aa, Artificial Sequence
  Synthetic
SEVEEIFKRVTDLLKRNRDLVREILERSRRLVERNDREAKKILDDARRLIEELEDAVRKE

SEQ ID NO: 19536 - protein, 59 aa, Artificial Sequence
  Synthetic
ERVKKLLDELRERVKRSVEESRRVLDDSRRKSEDSLRRSEELLKRVEEIVERVAREVER

SEQ ID NO: 19537 - protein, 60 aa, Artificial Sequence
  Synthetic
SEVEEIARRVDKLLKDNKRTVDEILKESRRLVKENNELVDKILREVEELLRRLEDEVRKE

SEQ ID NO: 19538 - protein, 59 aa, Artificial Sequence
  Synthetic
ERVEKLLRELEKRVKESVDTSREVLKRSREDSKRSEDRTEKVLREARKRVEDVADKVRK

SEQ ID NO: 19539 - protein, 60 aa, Artificial Sequence
  Synthetic
REVEEIVKEVERLVRENDKVAKEIVDESKRLVEENRKRVEEIRREVEELIRRLEDAVRKE

SEQ ID NO: 19540 - protein, 59 aa, Artificial Sequence
  Synthetic
KRVKDLLEELRKRVKDSRKKSEELLEESERRSKKSLDDTRRVLKDARDIVEKVADEVRK

SEQ ID NO: 19541 - protein, 60 aa, Artificial Sequence
  Synthetic
SDVEEIKKRVKELLEENKRLVETIEREVRRLIEENRRLAKRILDEVRRLLEELKDRVDKD

SEQ ID NO: 19542 - protein, 59 aa, Artificial Sequence
  Synthetic
ERVKKLLTDARKEVERSLRESKKALDELRRIVEKSLRDTERLLRTAEKEVEDVLREVER

SEQ ID NO: 19543 - protein, 60 aa, Artificial Sequence
  Synthetic
SEVEKIFRDVEDLLRRNEETAKEILKTSEELVRRNEELVRRILEEVRDLIRKLREVVERS

SEQ ID NO: 19544 - protein, 59 aa, Artificial Sequence
  Synthetic
RRVEELLRRLAEAVKESLERSERLLRRSEEESRRSLKKTEDILREAREIVRKVAEEVKK

SEQ ID NO: 19545 - protein, 60 aa, Artificial Sequence
  Synthetic
REVEEIVKEVRRRLERNDEVAERIVRESERLVEENNRLVEEILRRVRKLIEELLDLVRKS

SEQ ID NO: 19546 - protein, 59 aa, Artificial Sequence
  Synthetic
ERVEKLLRDLEREVDESRKKSRKLLERSREESDRSLKTTEDILREAERIVEKVEEDVRR

SEQ ID NO: 19547 - protein, 60 aa, Artificial Sequence
  Synthetic
SDVEEIVRRAEKLVEDNDRVAEKIHEDNRRSNKRTLDEVRKILEEVRKLIKDLEDEVRRD

SEQ ID NO: 19548 - protein, 59 aa, Artificial Sequence
  Synthetic
ERVKRLLRRVEKSVRDSKRRSEKLLEDSERSSEKVEKDVRDVLKEAREIVRDVAEKVEK

SEQ ID NO: 19549 - protein, 60 aa, Artificial Sequence
  Synthetic
EEVERIVEDVRRLLEENRELVKRILDEVRKLIKENNRLAREILETVRTELEKLRDLVRKL

SEQ ID NO: 19550 - protein, 59 aa, Artificial Sequence
  Synthetic
ERVEKLLEELERRVEESVEESERVLREAEKIVRDSRKTTEELLEEAKRRVDEVAKEVKK

SEQ ID NO: 19551 - protein, 60 aa, Artificial Sequence
  Synthetic
SSVDEILKDVRRSNKENLDLVEKILRESKKLVEENRRLVKEILDRVRKLIKELLRLVRED

SEQ ID NO: 19552 - protein, 59 aa, Artificial Sequence
  Synthetic
EKVEDVLRRLKRTSERSLEESKKLLEESEKDSDRSRKESEEVLREAEEIVKRVLKEVER

SEQ ID NO: 19553 - protein, 60 aa, Artificial Sequence
  Synthetic
DDVETIVERVRELLEENNRLAREIVERVEKLLKDNDDLVKEILEEVDRRIRKLEEAVKRD

SEQ ID NO: 19554 - protein, 59 aa, Artificial Sequence
  Synthetic
RRVEELLRKLEEDVKRSLEDTKRLLDELKKKVDESRKRSKDVLDKAREIVDRVRRSVEK

SEQ ID NO: 19555 - protein, 60 aa, Artificial Sequence
  Synthetic
SEVEKIVRDVEESNKKTKKKVEDIEEEVKDLVRKNNELVKRILEEVKRLLEELKRVKKDD

SEQ ID NO: 19556 - protein, 59 aa, Artificial Sequence
  Synthetic
ERVKRLLDRLRRTSEEVLERVEEVLKKAEEIVRKSFEDSKRVLRKAEEDVKRVARDVEK

SEQ ID NO: 19557 - protein, 57 aa, Artificial Sequence
  Synthetic
SVDEAAKEAEEIVETVERESRKLLEDSRRIVEEVKKRSEEILEEVRRRVEEVVKESK

SEQ ID NO: 19558 - protein, 56 aa, Artificial Sequence
  Synthetic
LERLLEALRRVIDEDRKRSKKLHEENKRVIERDKEISDKLLDDLRKLVADLRRRAK

SEQ ID NO: 19559 - protein, 56 aa, Artificial Sequence
  Synthetic
REAEELEKEVKKVVDDSKKRLDELDEENRRVDETIKKISEDLTREVKDVIRRIRDG

SEQ ID NO: 19560 - protein, 59 aa, Artificial Sequence
  Synthetic
EELRELVERLRRRLETVNRELERRVRELKRSNDESHRENREVIEELIKELKKVLDDVRK

SEQ ID NO: 19561 - protein, 56 aa, Artificial Sequence
  Synthetic
DELREILRKVEKVVEDIERTSDKLRREVDKVVDDSRRKLEELEKEVKKVIEDIRDG

SEQ ID NO: 19562 - protein, 59 aa, Artificial Sequence
  Synthetic
DRLKEAVKELAKRLKDVHERNKRLIDTLREKLKRINDELERSVRELKKELEEVIDRVRK

SEQ ID NO: 19563 - protein, 56 aa, Artificial Sequence
  Synthetic
DEVEELKRRVDRLVEEIRKLSEELLKRNRDVDREIKKRVKDLEDKVRKVIRDIEEG

SEQ ID NO: 19564 - protein, 59 aa, Artificial Sequence
  Synthetic
RELDEVIKEIRRRLEKVHRDNRRVIDEVRRSNRDSERDIAEAVERLTRLLETVLEKVKT

SEQ ID NO: 19565 - protein, 61 aa, Artificial Sequence
  Synthetic
DELEELRTTVTKLLEDLKKISDDLREEVRRLLEEVEEISKRLEETVRRIIKRVEDIVRRDG

SEQ ID NO: 19566 - protein, 59 aa, Artificial Sequence
  Synthetic
KDVKEVVKKLRDELRRVLERNKEVIDRLREKAREVLEKDRKLVDDLREEAREVLERVKT

SEQ ID NO: 19567 - protein, 61 aa, Artificial Sequence
  Synthetic
DELEEIKKEVEELVKTNERIVDKLREDNKRLVEEVKRISEELEREVRRIIREVREIVKRDG

SEQ ID NO: 19568 - protein, 59 aa, Artificial Sequence
  Synthetic
KDVEKLLRELEEEAKRSLKRNRDVIEKLREENKRLLDDDRRVVEELRKEAKDVLDEVEK

SEQ ID NO: 19569 - protein, 61 aa, Artificial Sequence
  Synthetic
REVDELKKTAEKLIRDDERLVEEVLRTSKKLVREDEDMVRKLRKTIEDLIRRLTDVAREEL

SEQ ID NO: 19570 - protein, 59 aa, Artificial Sequence
  Synthetic
RDVKRVLDEVEKLVEDSKRETERVLRESEERSRRSLEETEKALKDLAKLAEDIKREVEK

SEQ ID NO: 19571 - protein, 61 aa, Artificial Sequence
  Synthetic
REVDELRKRIEDLVRRDEEVARKVLEDVRRLVRRNREKARELLERVEKLVRDLKRVADRDL

SEQ ID NO: 19572 - protein, 59 aa, Artificial Sequence
  Synthetic
EEVKRVLDELRKLVKDSERKTKEVVEKVREDVKDSLRRSEEVLKRVKELVDRVADEVRK

SEQ ID NO: 19573 - protein, 61 aa, Artificial Sequence
  Synthetic
SDLEKLKERVDELIRRDDELVKRVLEESRRLVDRNKKKVDELRRRARKLIEDLKRVADRDL

SEQ ID NO: 19574 - protein, 59 aa, Artificial Sequence
  Synthetic
ERVKELLDRLRKKVEDSREKTERVLKESRELSDRSLERSEEVLERVRREVREVVERLKK

SEQ ID NO: 19575 - protein, 61 aa, Artificial Sequence
  Synthetic
DSLREVEKRIRELIRENEELVKEVLERSKRLVDEDRETAERLRKTVEELLKRLREVADKEL

SEQ ID NO: 19576 - protein, 59 aa, Artificial Sequence
  Synthetic
DEVRKALEDLKRTVDESERRTEEVLKESEDLSRRSLKETEDLLRELEKRVKEVADRVED

SEQ ID NO: 19577 - protein, 61 aa, Artificial Sequence
  Synthetic
SDLDEVRKEVKRLIDENRTLVDEIRRRIEKLIRENKKKVEELRKRAEELIRRLKEVADRDL

SEQ ID NO: 19578 - protein, 59 aa, Artificial Sequence
  Synthetic
RDVKRLLDDLKRLVKESLDETERVLRELRKEVKDSLRDSERALREVEDLVRRIKKRVEK

SEQ ID NO: 19579 - protein, 61 aa, Artificial Sequence
  Synthetic
DEVKKLEEDVRRLIEENEELVRRVKKTSDDLVKRNKEKVEELRKRVEDLIRRLREVERRDL

SEQ ID NO: 19580 - protein, 59 aa, Artificial Sequence
  Synthetic
DEVRKALERLRDEVRRSVTDTDRVLKESEDRSRKSLEDSERVLRELEELVKRILDDLAR

SEQ ID NO: 19581 - protein, 61 aa, Artificial Sequence
  Synthetic
SEVDRLRETIKRLLEENKELVERLRERVRKLIRENEKKVEELRDRAKKLIDRLREVRTRDL

SEQ ID NO: 19582 - protein, 59 aa, Artificial Sequence
  Synthetic
RDVERALKELRDRIEESLRRSEEVLKELEERVKESRDESRRVLEEVRRLVEEIKRRAEK

SEQ ID NO: 19583 - protein, 61 aa, Artificial Sequence
  Synthetic
KDVEDLEREIDRLLDEDRKVVEDLERKIKKLIDDNKRLVDKLREDVERLIRRLREVTEKEL

SEQ ID NO: 19584 - protein, 59 aa, Artificial Sequence
  Synthetic
KKVKEVLDELRKRVDRSLEEAEKALRRLEKLVRDSLRRSEEALERLKRLVDDVKKKVED

SEQ ID NO: 19585 - protein, 61 aa, Artificial Sequence
  Synthetic
SELDEVKRRAKELVDRDKKLVKEVLDTSRELVRRNEELVRRILEEVRKLIEDLAEVTKRDL

SEQ ID NO: 19586 - protein, 59 aa, Artificial Sequence
  Synthetic
KEVKELLDEVRRLAEESRREVERVLRESEKRSRESLKKSEDALERAKKLVEDIKDEVER

SEQ ID NO: 19587 - protein, 60 aa, Artificial Sequence
  Synthetic
SEEDKIREIVDRVLKESEKLIEEIERRVDKVLKRIKELTDEIKKRAEDVIREIEDIVRKE

SEQ ID NO: 19588 - protein, 59 aa, Artificial Sequence
  Synthetic
DELRKVVEEIKRELEKIDKKLEEVVRRIEKKLEDILKENSKAVREIRELLKKVKRELEK

SEQ ID NO: 19589 - protein, 60 aa, Artificial Sequence
  Synthetic
DEVEELKRRVEKLLEEIERLTKTHEDRSRRLIEDIRDSNRKLKEDAERLIKEIEELKRKV

SEQ ID NO: 19590 - protein, 59 aa, Artificial Sequence
  Synthetic
EELKKVVDDLRREAERILRRDEEAVKRSEKLLRDILEHVKRVVDEIREELKRILDRVRE

SEQ ID NO: 19591 - protein, 60 aa, Artificial Sequence
  Synthetic
DEVREIEKRVRDLIREIEKSNRDLEREAKRLIDEIDDLSRKLKEDADKLIEEIKELKKKV

SEQ ID NO: 19592 - protein, 59 aa, Artificial Sequence
  Synthetic
EEVRRVVEKLRRLLKTITEHVKEVLDRLRREAEDALRRDKEVADRIREEARRILEDVKK

SEQ ID NO: 19593 - protein, 60 aa, Artificial Sequence
  Synthetic
DDVKRIEKEVRRLLREIERLTREHEKESRELVREIEELSRRLEEEIKRLIEEIEELRKRV

SEQ ID NO: 19594 - protein, 59 aa, Artificial Sequence
  Synthetic
KEVRDVVKRLEEEIREVLAKDEEVARRSVEALADILRRDKDVVDRIRKLLKEILDRVRK

SEQ ID NO: 19595 - protein, 56 aa, Artificial Sequence
  Synthetic
DREEVVKEIKKRLEDLNRRVREVVKKIDRELEKLLEESKRVVDDLRRRLEELKKRI

SEQ ID NO: 19596 - protein, 56 aa, Artificial Sequence
  Synthetic
ERELERLVKEVEKTNERLLDELRKAAEEVAKRSEDTLRELRDIIKKVEERATDIAR

SEQ ID NO: 19597 - protein, 56 aa, Artificial Sequence
  Synthetic
SKEDVVREIEKTLKDLLDDSRRVVRESEERLKELNRRLREVVKESKRRLDEALRRI

SEQ ID NO: 19598 - protein, 56 aa, Artificial Sequence
  Synthetic
TEELRRLVDKVREDSERTLERDRRLAKEVSDRNKRLVEENRKIVEEVLKTIEELRR

SEQ ID NO: 19599 - protein, 56 aa, Artificial Sequence
  Synthetic
EREKVVKKIKEDLDRLNEEVKRVVDESRKLLKRLNERVEEVIREIRKTLEELTRRI

SEQ ID NO: 19600 - protein, 56 aa, Artificial Sequence
  Synthetic
ERELERLVAEVAERNKKLLKDDKDLARKVAEDNEDLLRRLRDEVEKVRRTADEIRR

SEQ ID NO: 19601 - protein, 56 aa, Artificial Sequence
  Synthetic
SREEVVDELRKRLEELNKEVREVVRESERKAERALEEVEEMVKRVREELEKLKRDI

SEQ ID NO: 19602 - protein, 56 aa, Artificial Sequence
  Synthetic
KDDLRRLLKEVAERNRKLLEDDEELAERVLREVRRLLEELRRRLKEIKERLDEIRR

SEQ ID NO: 19603 - protein, 56 aa, Artificial Sequence
  Synthetic
SREEVVRRADKLLKDLNKRVKEVIERSERKLRELNERVRDVVRKIEKRLEELERRI

SEQ ID NO: 19604 - protein, 56 aa, Artificial Sequence
  Synthetic
EEELKRVITKVLRDNEELLKTDEELAEDVARKNKKLLDDLEKTVKEVMDRAEELRR

SEQ ID NO: 19605 - protein, 56 aa, Artificial Sequence
  Synthetic
SREEVVRDIERRLRELNKRVADVADESRRRLEELNEKLRRVVEESRRRLEELRKEI

SEQ ID NO: 19606 - protein, 56 aa, Artificial Sequence
  Synthetic
DDTLRREVKKVERENERLLEEDRRLVREVTRRNEKLVKDNREIVKEVLERAKELTR

SEQ ID NO: 19607 - protein, 56 aa, Artificial Sequence
  Synthetic
SREEVVKEIKDRLKKLNDDVKRVIKESEDLLRKLNEEVRDVVRKIEETLEELLRRI

SEQ ID NO: 19608 - protein, 56 aa, Artificial Sequence
  Synthetic
EERLKEVVAKVAKENKDLLRRDEELARRVAERNKKLVEDLRRLVEEVRRRAEELRR

SEQ ID NO: 19609 - protein, 56 aa, Artificial Sequence
  Synthetic
SESERVEELLKEVAKRVKEVSDRSKRLLEEIERRVKEVSDESEELLRRIIDEAKKV

SEQ ID NO: 19610 - protein, 56 aa, Artificial Sequence
  Synthetic
ERVVDRVRRELEKLIKDLEENSREVERSLRELIEHLKKNVEDVEREAKRVIDELKT

SEQ ID NO: 19611 - protein, 60 aa, Artificial Sequence
  Synthetic
SLEEKLRRVLDELRKTIETLLKTNKDVLKKLEEDVKRIIRRNEEVLRDLERKVRDLKKKG

SEQ ID NO: 19612 - protein, 59 aa, Artificial Sequence
  Synthetic
ERLKRVVDELRKRAKKLLEDVERVIRKSEEEARRLLREVEKVVRELDREAEKLVEEVRR

SEQ ID NO: 19613 - protein, 60 aa, Artificial Sequence
  Synthetic
SSEETLRDILKKVEERSEETLRHNERVLEEVRKEVERILRRNEEVLRRLEKEAKELKKRG

SEQ ID NO: 19614 - protein, 59 aa, Artificial Sequence
  Synthetic
ERLKRVVDDLERRIRELLERDERVIRRTEEEARRLLDDVRRVVEELDKRAEDVVKEVKD

SEQ ID NO: 19615 - protein, 60 aa, Artificial Sequence
  Synthetic
DEEETLKKILDDVRKVSRDTMEENKTFLEELSKVADKIIRDNEKVLDDHRKAAEELKKRG

SEQ ID NO: 19616 - protein, 59 aa, Artificial Sequence
  Synthetic
ERLKRVVDDIRRSLEELLKRDEEVVEESRKEVKRLEEEVREVVTRSDKLMDELLKKVKR

SEQ ID NO: 19617 - protein, 61 aa, Artificial Sequence
  Synthetic
SEKEEVLREAREEAKDIERRLERLLERDKEVIDRVEKDLERLLRENKKLIDDVRRRVEEEG

SEQ ID NO: 19618 - protein, 55 aa, Artificial Sequence
  Synthetic
EVMDEIRRLAERVERRLREVLERSKKLVDDLRERLKEVLKRIEDLYRRLEEEADR

SEQ ID NO: 19619 - protein, 60 aa, Artificial Sequence
  Synthetic
TAKEVLDEIRKVHEDLNRKIEEVLKHSEDVLREVEERNERSVRHSEDMLRRLEERIDRKG

SEQ ID NO: 19620 - protein, 59 aa, Artificial Sequence
  Synthetic
EEVLRKLLEENKKEIRRLEEELKRLNEEVKKRIKELEDSSRKENDRVRERIRELDERVK

SEQ ID NO: 19621 - protein, 60 aa, Artificial Sequence
  Synthetic
TLDEAARTIEELLREVEERARRVLRHSEKVLDKVRKENEDSLRHSDEVLRRVEREAEKKG

SEQ ID NO: 19622 - protein, 59 aa, Artificial Sequence
  Synthetic
EEVIEKTLRDVERRLRDLEDKLRKLNEEVEKTIRDLRRSSEALNKKVKDLIKKLLDEVK

SEQ ID NO: 19623 - protein, 60 aa, Artificial Sequence
  Synthetic
TLDEVAKEIEELLRRVEEENRKSLEHSERVLDEVRERNERSARHSEEVLRRLREEVRRKG

SEQ ID NO: 19624 - protein, 59 aa, Artificial Sequence
  Synthetic
EKVIKETLDRVRETIKRLIKSSRDLNEEVKRRIRELIESSRKKNEDVKKTIEELLRRVK

SEQ ID NO: 19625 - protein, 60 aa, Artificial Sequence
  Synthetic
TADEVLKEIEDVHRRVNTENRKSIEHSKKVLEEVRRTNEKSIEDIERLLREVEKRIRDKG

SEQ ID NO: 19626 - protein, 59 aa, Artificial Sequence
  Synthetic
EDVLRKALEENERLIRELEESSRRLNERVKELIRELEKSSKRLLDEVKKLIDELREEVR

SEQ ID NO: 19627 - protein, 60 aa, Artificial Sequence
  Synthetic
TLEEVVEEIRRRHEEVNRRNRESVENSREVLERVEEDNKDSLRRIRELLERVARKLDERG

SEQ ID NO: 19628 - protein, 59 aa, Artificial Sequence
  Synthetic
EDAIRDMLRRNEERLRRLIESSEKLNRESRDVIRKLIESSRDLLRKVKETIEKLEEEVR

SEQ ID NO: 19629 - protein, 60 aa, Artificial Sequence
  Synthetic
TLEEVVRDIERVHEEVNESLKRVNETTTDMHRRLNEEAKRVLEEIEKLLKDVEKKIRDKG

SEQ ID NO: 19630 - protein, 59 aa, Artificial Sequence
  Synthetic
EDAVKRELDRNREEIKKLEKRIRDVLKKNKDLIDKVREELKRLLDEVKKRIDKLAEEVK

SEQ ID NO: 19631 - protein, 59 aa, Artificial Sequence
  Synthetic
SLDEAAKEIEELLRRSHEELKRVVKEIRDLLRRSHEELRRALEEIERLLDEVRRKLEER

SEQ ID NO: 19632 - protein, 59 aa, Artificial Sequence
  Synthetic
DETVKELLRRVRKLVRESIEEVKTLLREAEEKVRRNERKVEEILRRVRETIRRLEERIK

SEQ ID NO: 19633 - protein, 59 aa, Artificial Sequence
  Synthetic
SLDEALERIRRMLKRSHDENRRVAEDIKRLLEESHRENERVVKEIRDVLDKLREDAERN

SEQ ID NO: 19634 - protein, 59 aa, Artificial Sequence
  Synthetic
DEDVKRLLDDVRRTVEENIRRSETELRDVKRRVTETIRESERLLEEVKRIIDKLREEAK

SEQ ID NO: 19635 - protein, 59 aa, Artificial Sequence
  Synthetic
GLDEVLKEIRELLKESHDRLRRVLEEIEKLLEDSHRRNEEVVRRIRKVLEEVREKAERD

SEQ ID NO: 19636 - protein, 59 aa, Artificial Sequence
  Synthetic
ERLVKELLDRARDKIRRNIEELERKLRAVEEKVRRTIRESEELLDRVRKIIEDLEREAT

SEQ ID NO: 19637 - protein, 59 aa, Artificial Sequence
  Synthetic
DLDEALKEIERLLEEVERRNKEVLERIRRLLKRSHEELKRVLEEIEKLLRDLKKRVDDG

SEQ ID NO: 19638 - protein, 59 aa, Artificial Sequence
  Synthetic
RDSVRDLLRRAKERLDELIKTSKELLDRARKKVKENEEELRELLKDVRRIIKKLTEEVR

SEQ ID NO: 19639 - protein, 60 aa, Artificial Sequence
  Synthetic
SELEDLLREVKELIDRLIDDSRRLVKTAEELIREAIKRSEDLLEEVKRLIDRVTEMVERG

SEQ ID NO: 19640 - protein, 59 aa, Artificial Sequence
  Synthetic
ERVREVLERIKRLLEELKKRDEDSVREIERLLEELKRRNDRVVDEIRKLLKELAERVKK

SEQ ID NO: 19641 - protein, 59 aa, Artificial Sequence
  Synthetic
DLDEVIRELEKLLKESHEAVKRVIKKSEDLLRDSHKKVKDVIRRSEDLLRKLEEEVRKN

SEQ ID NO: 19642 - protein, 59 aa, Artificial Sequence
  Synthetic
RTLLEELRRRIEELLKENRELLKRHEDKSKKLLEDNERLLREHAKKSDEIRRELRERVR

SEQ ID NO: 19643 - protein, 59 aa, Artificial Sequence
  Synthetic
DEVERAKDVLDELRRRVEEELRRWKETSERLREESERALEKSEARLREAAEKLERVKRN

SEQ ID NO: 19644 - protein, 56 aa, Artificial Sequence
  Synthetic
EEVLRDIREKLRELAERLKRLLDDDKRVLDEVRKANEDLLRKIKEDIEELRKELEK

SEQ ID NO: 19645 - protein, 60 aa, Artificial Sequence
  Synthetic
DEDEEVKRTIEELRKEVEKTLREIEKSLKESEDKSRKHLEEVKKSLKETEEEVDELKKRN

SEQ ID NO: 19646 - protein, 56 aa, Artificial Sequence
  Synthetic
EKVLRELEERVRRLKKELKRVLDDYKRKLEEAERRNRKVLKEYEDSLRELADRLRR

SEQ ID NO: 19647 - protein, 59 aa, Artificial Sequence
  Synthetic
DEDREVRKTIEKLKRDSERHLEEMKRSAEESRKEVDKLLKKIKDSLRRTEERVRRLKKN

SEQ ID NO: 19648 - protein, 56 aa, Artificial Sequence
  Synthetic
EEVLRELRKIVEELRKRNEDVLEEYERILRELKERLDRVLKEYEDRLRELEKELRD

SEQ ID NO: 19649 - protein, 59 aa, Artificial Sequence
  Synthetic
SEAEKAKETIDRLADRVRKLLEEIKRSLDDSRRKSKETVEENEKTLDRMRKEVDAAKER

SEQ ID NO: 19650 - protein, 56 aa, Artificial Sequence
  Synthetic
EEVLRTLEEIIRRLTKELEDVLREYERELRRLEEENKRVIDKTEEEIRRLADRLRR

SEQ ID NO: 19651 - protein, 59 aa, Artificial Sequence
  Synthetic
EEDERADETLKRIKRESDETVKKNERTITELLKRVKRLVDEIRKSLEETARRVDSAKKR

SEQ ID NO: 19652 - protein, 56 aa, Artificial Sequence
  Synthetic
EEVLRKFRKILEEAAELNKEVIDRSRKIIEDASRLLREVLEDYETKLRELKDKLDT

SEQ ID NO: 19653 - protein, 56 aa, Artificial Sequence
  Synthetic
SLKEVIDDLERIIRELEKRNREVIKRVRKIVREAEEKNEDVIRKLKETIERLEREL

SEQ ID NO: 19654 - protein, 56 aa, Artificial Sequence
  Synthetic
SRELRDEIRKIKKKNDEHLKRLEDELRKLLEKSDRHVKELEDRIRKAAKEVKDAKD

SEQ ID NO: 19655 - protein, 56 aa, Artificial Sequence
  Synthetic
SLEDVIRDLARIIEEAERRNKTVLDELRKTIKELVEENEKVLDEDDKKSRELEKRL

SEQ ID NO: 19656 - protein, 56 aa, Artificial Sequence
  Synthetic
SRRLREEIKRLLRESEKHVEDLRREIERIKRENEEHLKKWRRDSERLEKEVEDAKR

SEQ ID NO: 19657 - protein, 56 aa, Artificial Sequence
  Synthetic
DELEKLRDDARRIEEKHRRTVEKDKDVVRRMDKEVKDHVRRLKELAKKLEDDVRKR

SEQ ID NO: 19658 - protein, 60 aa, Artificial Sequence
  Synthetic
KRSVDEVLREITEIVERVMELNDKSVEETRRIVERLKEEIDTVNDEIAKIVRKVIEEIKR

SEQ ID NO: 19659 - protein, 56 aa, Artificial Sequence
  Synthetic
DELERLKEAAKRLADEVKEHVDRSRENAKRLKEEVEEHVKRLEDVARTMDEEVKRR

SEQ ID NO: 19660 - protein, 60 aa, Artificial Sequence
  Synthetic
KESVDRVLKEIEDIVRRLEERLDESNKELKEIVDDVTEKLERVNRKIAEIVKRLSDEIRK

SEQ ID NO: 19661 - protein, 56 aa, Artificial Sequence
  Synthetic
DELEELRRAAEEMEKEVREHVKRSEKNAKDLEKEVREHVKKLREVLRRLTEKVKRR

SEQ ID NO: 19662 - protein, 60 aa, Artificial Sequence
  Synthetic
KEKVDRVLEEITREVERLKKELDESNERLERIVRKVIEELRKVDEDAEERVRRLEEEIRR

SEQ ID NO: 19663 - protein, 56 aa, Artificial Sequence
  Synthetic
DDLDRLREAAERMAREVEDHVRKLKDLIRRVRERVERHVKKLEDDLKRVKEEVDRR

SEQ ID NO: 19664 - protein, 60 aa, Artificial Sequence
  Synthetic
KDKVRKVLEDIKRIVDRLEERIREVDKDLERIVRELMKRLDEVNKRLEDTVRRLSEEIRR

SEQ ID NO: 19665 - protein, 60 aa, Artificial Sequence
  Synthetic
DLIEEIKKLAEDHHRRVKEVLDRNREVAERLKKRVRRIVEENKRLAEDVTRKIKELKRRV

SEQ ID NO: 19666 - protein, 59 aa, Artificial Sequence
  Synthetic
EDLRRVLEELREIVTRNEKEIRDTIRELEEIVKRLKEDNDRSVRELERILEELREELER

SEQ ID NO: 19667 - protein, 57 aa, Artificial Sequence
  Synthetic
DSDEEVRRVLEKVEEDVRRLAKDIRDSVRRSEERIDELVKKLEKSIDESRRRVETTA

SEQ ID NO: 19668 - protein, 55 aa, Artificial Sequence
  Synthetic
ERLLEEIEKVVEDLRRKAEELIEKNERLLRRLEEVAKELDKRNKELLEELIRRNE

SEQ ID NO: 19669 - protein, 57 aa, Artificial Sequence
  Synthetic
SEADKVREVLKRVKEEIDRLVEEIEKVNRDSRREVEKLVEKLRKSLKESKDRIARDL

SEQ ID NO: 19670 - protein, 55 aa, Artificial Sequence
  Synthetic
EELLRKIEEVLRRLTEDAKRLIRRNREILKELRELAKRLDEENKELLDELIKKAR

SEQ ID NO: 19671 - protein, 57 aa, Artificial Sequence
  Synthetic
SMIEKVREVLKEVADRVRRLLEENKKSIDDSARALEELIKRIRESLRKSEEDLKREV

SEQ ID NO: 19672 - protein, 59 aa, Artificial Sequence
  Synthetic
SEFVKRILDEVDEILKRLERRVKEHSRKNREELEKIRKEAEEILRENEELLEKIVRDAR

SEQ ID NO: 19673 - protein, 57 aa, Artificial Sequence
  Synthetic
EMVERLEESIDRSRKELDRLIEENKKVLEEVEERVRRLIEKLKRSIEESEERLRRKV

SEQ ID NO: 19674 - protein, 59 aa, Artificial Sequence
  Synthetic
DEVVRRLNEENKKLLEDIRRRAKDHSRRVREILEDLEREVEKMNEENKDLLERIVRRAK

SEQ ID NO: 19675 - protein, 57 aa, Artificial Sequence
  Synthetic
SMIEALKENIRRSEEEIRRLIEEWRKVSEDIEREVKKLIKELEESIDESAKRLREKV

SEQ ID NO: 19676 - protein, 59 aa, Artificial Sequence
  Synthetic
SDFVRKLLEENNELLKEIKKRVEKVLEESKELLKELREKIRRLNEKNKKLLEEIVRRAK

SEQ ID NO: 19677 - protein, 56 aa, Artificial Sequence
  Synthetic
SEIEKVVKDLRERLKELRESVKRLDDKNRELLERLEREVEEMDRRNEKLLRDLKRQ

SEQ ID NO: 19678 - protein, 59 aa, Artificial Sequence
  Synthetic
EELLRTLEKVLREIAEELERLNRKVRESIRESARRLKRLIEKLERSIRRSAEELRKRAK

SEQ ID NO: 19679 - protein, 56 aa, Artificial Sequence
  Synthetic
DEIDKIVKKLRDILREIEKRAKEVNKRNKELLDELRERVKDLDRTNEELLRELKDS

SEQ ID NO: 19680 - protein, 59 aa, Artificial Sequence
  Synthetic
DKLLKKLKDVLDEIAERIKELIRELRESIKKSAEELKRLIDRVRRSIEESAKRLEDRAR

SEQ ID NO: 19681 - protein, 56 aa, Artificial Sequence
  Synthetic
SELEKILEKLRRIVEELAKSVRKLNEENKELLKRLADSVKKLDDDNKRLLTDLRRR

SEQ ID NO: 19682 - protein, 59 aa, Artificial Sequence
  Synthetic
EELLRTLEDVLRKIAEDLERMNRELKRSIKKSADDLKRLNEKVKRSIERSAEELRKRRT

SEQ ID NO: 19683 - protein, 56 aa, Artificial Sequence
  Synthetic
DEIKKIVEEIKKTLEEIDKSVRELIRRAREILRELEESVRELIRRNSKLLEDLRRQ

SEQ ID NO: 19684 - protein, 59 aa, Artificial Sequence
  Synthetic
DELLKELEDVLKEVAEEIKRLNERLKKVLEEIERTLRELNRRLEENIRRSARALEETRR

SEQ ID NO: 19685 - protein, 56 aa, Artificial Sequence
  Synthetic
SEVEDLLRRIEKILEDLRRSVEELLKRIEDALRRLEEEIRKVTEESKRLLEDLTRR

SEQ ID NO: 19686 - protein, 59 aa, Artificial Sequence
  Synthetic
RELIEEVEKVVKRVEEALKRLNDRVRETLDEVRKRLEDAIRRWREESERIARELEKRTT

SEQ ID NO: 19687 - protein, 56 aa, Artificial Sequence
  Synthetic
SEADEIVRRIEELLKELEREIRKVIRDSERLLKELEDSVRELLKKIRDVLDELTKS

SEQ ID NO: 19688 - protein, 59 aa, Artificial Sequence
  Synthetic
EELLRKLEAVLDKVKKDLKKMIDDWRRVSERIARELEKLNRRVKEELDRVKEALDERTR

SEQ ID NO: 19689 - protein, 57 aa, Artificial Sequence
  Synthetic
SEIDEVVERIKRTLEEAEKRVKKASEDHKRRLDELRKKVEKLIEDNERTLEAVARRK

SEQ ID NO: 19690 - protein, 59 aa, Artificial Sequence
  Synthetic
ERLLRKLRKVVKDVDDRLKELLEENRDVVRRIKEELEKLLEKVRRSIEESRRRMRETRR

SEQ ID NO: 19691 - protein, 57 aa, Artificial Sequence
  Synthetic
SEVDEVLKDIRRILEEARKRVEELDRENKRILDEVREKVKELNERNKEILRAAEERK

SEQ ID NO: 19692 - protein, 59 aa, Artificial Sequence
  Synthetic
EKLLRDAKRVVEEVSKALKDLLKEVEDSVRRSKREMEKLLEELRESVKRSEEELRRTSK

SEQ ID NO: 19693 - protein, 60 aa, Artificial Sequence
  Synthetic
DEVEDLLRRNEELLKRLLEEIKKLTDEHREELKRLAEDVKKVVEDVRRLLKELEEMVRRG

SEQ ID NO: 19694 - protein, 59 aa, Artificial Sequence
  Synthetic
EKLVRKLEESVRRSTEELEKALKRNNDVIRRIAEALDDLLRRLEKVIREIEKKLRDDTR

SEQ ID NO: 19695 - protein, 60 aa, Artificial Sequence
  Synthetic
DRVEEAVKDIERLLRELKRDVERLVRENEKILKDAKREVDELTKDHRRKVEELDEMVKRG

SEQ ID NO: 19696 - protein, 59 aa, Artificial Sequence
  Synthetic
EDLLRKLEKVVRDVEKKLRKLLEDLKRSIDRSTRELEKLNEKNNEVIRDIERRLDEAET

SEQ ID NO: 19697 - protein, 56 aa, Artificial Sequence
  Synthetic
SEIEKLIEEIRRVVKEIKREVERAIRENEKLLRESKRRNDELIKEIERVVEELKKR

SEQ ID NO: 19698 - protein, 58 aa, Artificial Sequence
  Synthetic
RLIEELEKVLRDVEKVARDVLRKLRRSIEESRRRSEELNKTVKKVLEDVARTATERSR

SEQ ID NO: 19699 - protein, 57 aa, Artificial Sequence
  Synthetic
REIEEAIKDVERVLRESEERNRRLIERIKRMLKKSEDENRKFIEDNKRLADDLRRRN

SEQ ID NO: 19700 - protein, 58 aa, Artificial Sequence
  Synthetic
EDVERLRKVIEEVKRRMKELNERLKEELREVAKRSRDLNKELRESIEESADRARRRRK

SEQ ID NO: 19701 - protein, 57 aa, Artificial Sequence
  Synthetic
DEIERLREDIKRVLEESTRRNKKLLDEIRKALDESRRKNEEAIRRNEEVVRDLKDRK

SEQ ID NO: 19702 - protein, 58 aa, Artificial Sequence
  Synthetic
DKVRTLRRELEEVARALEELNRRVEEELDEVRKESERLNKELEDSIRKSAEDAKRTTK

SEQ ID NO: 19703 - protein, 60 aa, Artificial Sequence
  Synthetic
DEKDKAIEDVRDLLRRNEEVARRMDKRLKDLLDTIRKKAEDLDRELKRLLEEAERLVREG

SEQ ID NO: 19704 - protein, 55 aa, Artificial Sequence
  Synthetic
KELEKVLEEIRRRSEELLKHHAEVIERIERDVERLRRHHEDTIRKIKEKVDRDRK

SEQ ID NO: 19705 - protein, 60 aa, Artificial Sequence
  Synthetic
DEDREAIKEVEKLLRDNERVARRLDEEVKELLDEMRRRSEEMDRELERLLEEAKRLADKG

SEQ ID NO: 19706 - protein, 55 aa, Artificial Sequence
  Synthetic
EELKEVLREVDKRSKELLKHHKRRIEEVRKRVRELNKHHEDVIRKIKKKVREDRK

SEQ ID NO: 19707 - protein, 60 aa, Artificial Sequence
  Synthetic
KEAEEAIKRVEDLLRRNKEVAERIIREIRRLLREADETSKRMDEDLRRLLREAEDLVRRG

SEQ ID NO: 19708 - protein, 55 aa, Artificial Sequence
  Synthetic
RELDKVLERVKRESDRLLKEIEKVVREVEERLRRLNEHHEKVIREIEKKLEDDRR

SEQ ID NO: 19709 - protein, 60 aa, Artificial Sequence
  Synthetic
DEDREAIERVRRLLDENRKVVEELDERLKELLRDAEEKSRRVIKTLRELLKEIEDLARRG

SEQ ID NO: 19710 - protein, 55 aa, Artificial Sequence
  Synthetic
DELRKVLEDVERASKELLDHHRDVIRRIEEELKRLNKELEKVIREIERAVEELER

SEQ ID NO: 19711 - protein, 60 aa, Artificial Sequence
  Synthetic
DEDRDAIRKVEDLLRRIEEIVRRLIEEVKRLLEDNRRKSKRFIERVDELLKEMEKLVREG

SEQ ID NO: 19712 - protein, 55 aa, Artificial Sequence
  Synthetic
KELEELLRRVEREVEKLLTDLRRLLREVKETSKRLNEELKRRADEVEKKADEDRK

SEQ ID NO: 19713 - protein, 61 aa, Artificial Sequence
  Synthetic
SSKDRIRKVLEEVRETLDRLAKRIEKSLRDSAKRVEDLAEENRTSLKETKERIDELIKRRK

SEQ ID NO: 19714 - protein, 55 aa, Artificial Sequence
  Synthetic
EELIRRIEEELKRIEDTVEKIIRKDEKLLEDIERESERHIREDKELLKELEKEER

SEQ ID NO: 19715 - protein, 61 aa, Artificial Sequence
  Synthetic
SSDKEIEDVLRKVKDELDKLARALDESLKRSEKDIDRLEEELKESHDRTREEIRKLIEERN

SEQ ID NO: 19716 - protein, 55 aa, Artificial Sequence
  Synthetic
DELIREIKKVLDRIREEIERLLREDEELLERLREDAKRILDKNKELLDELRRRVK

SEQ ID NO: 19717 - protein, 56 aa, Artificial Sequence
  Synthetic
SADRKLEEVLKKVEDDIRDLERRLKRSLDESKREVERLERENRRVLEEVEKKVRAD

SEQ ID NO: 19718 - protein, 59 aa, Artificial Sequence
  Synthetic
EETVKRIIEKIERILRKLKRDAERILDKDRKLLKKLEEESRKHIEDVKRLLEELERRTR

SEQ ID NO: 19719 - protein, 56 aa, Artificial Sequence
  Synthetic
ELEEKLKRSLEDSRRRVEELRRTNEEVLREVEEEIRRLIKENEDSLRESKKRVDDR

SEQ ID NO: 19720 - protein, 59 aa, Artificial Sequence
  Synthetic
KETVDKILEDDKELLRRLEEESKRHIDEVRKILEDLERRSRRHIEEDKKLITELEKETK

SEQ ID NO: 19721 - protein, 56 aa, Artificial Sequence
  Synthetic
DLDERLRRSLKRSKEEVERLRKENEEVLRRSKETTKELIKTNEKVLEDVERLVRES

SEQ ID NO: 19722 - protein, 59 aa, Artificial Sequence
  Synthetic
RETVEKIIKEDEDLLRKLKEESDRHIKDVERVARENERESKRHIEEVRKVLDELREETR

SEQ ID NO: 19723 - protein, 56 aa, Artificial Sequence
  Synthetic
SAEEKLEEVLKRVAERIEELIRRNRRVLDRVREEIKRLVEENRKSLDESERRVRER

SEQ ID NO: 19724 - protein, 59 aa, Artificial Sequence
  Synthetic
EETIERIIKKIEDILRKLEEESERHIRRVEEELKEMEKRSREHIEEDKRLLEELERRTK

SEQ ID NO: 19725 - protein, 56 aa, Artificial Sequence
  Synthetic
SAEDELRKVLEKVREDIDRLADENRKVLKRSKDETKRLIKENREVLERVEEIIRRD

SEQ ID NO: 19726 - protein, 59 aa, Artificial Sequence
  Synthetic
EEAIERIIRRIREILERLRKKSEEHIRRVEDVARRNEEESREHIKTVEKILEELKRKAD

SEQ ID NO: 19727 - protein, 56 aa, Artificial Sequence
  Synthetic
SEVEELIKRLKKVLKELVDKVRKVIEDTKELLERLKRRSEDHIRKLREVLKEAKDQ

SEQ ID NO: 19728 - protein, 59 aa, Artificial Sequence
  Synthetic
EELDRRIEKVLKEIEEKIREVIKEWERVHREVNELLKRLIDENRKVLDEIRKLLEEKSK

SEQ ID NO: 19729 - protein, 56 aa, Artificial Sequence
  Synthetic
SEAEDLIRRLKEVLDELKKKADDLIRDTKRLLDEIRKKSEDHIKRDKELLKDLKRR

SEQ ID NO: 19730 - protein, 59 aa, Artificial Sequence
  Synthetic
DRALREIEKVLKEIKELIEKVIRDWKRVHDEVNEELRRLIEKNRKSLKETADELDRKRK

SEQ ID NO: 19731 - protein, 56 aa, Artificial Sequence
  Synthetic
SEVEKLIKEDKELLERLKRDVERLIEELRRTLKELKKESEKHIEDDKRLLDDLRDR

SEQ ID NO: 19732 - protein, 59 aa, Artificial Sequence
  Synthetic
DKLITDIRRSLDETRRRIEKLIREIEKVLREIEETLRELEKRNRESLERTRETLERKSK

SEQ ID NO: 19733 - protein, 60 aa, Artificial Sequence
  Synthetic
SEVDELIERDKKLLRDVERDVRRLNKEVRDILDEIRKDVEDALKENKELLDRLREMVKRG

SEQ ID NO: 19734 - protein, 59 aa, Artificial Sequence
  Synthetic
REVLKRLEDSSKDTTDKLRELLRSHKKVIDEVREKLKELLDRYRKVSDEIREEIDRARK

SEQ ID NO: 19735 - protein, 60 aa, Artificial Sequence
  Synthetic
SEVEKLIEDDRKLLEDAEEEVRRNNREIERILDKAREDVKRIIKEIEDLLREADEAAKRG

SEQ ID NO: 19736 - protein, 59 aa, Artificial Sequence
  Synthetic
EEAKRRIKKSIDDSRRELKRLLESNRKVIEEVKKTLEELIRTLEEVVRRVEDRLKKLAD

SEQ ID NO: 19737 - protein, 61 aa, Artificial Sequence
  Synthetic
DSVEELLKRLRDLLEESKRRAERLIREIERLLRESEKRVRELNRRLEELLREAEDRVRKEG

SEQ ID NO: 19738 - protein, 59 aa, Artificial Sequence
  Synthetic
EDALRKLEKVIREIEREHRRLLEEIRRVLKEVDKRHDEVRKSHEDVIRRIEERLERLKK

SEQ ID NO: 19739 - protein, 61 aa, Artificial Sequence
  Synthetic
DSVERLIEEIRRLLKRSEEIARKLIRDAEKLLEEHRRRVEELNREIERKLEELDEKARRRG

SEQ ID NO: 19740 - protein, 59 aa, Artificial Sequence
  Synthetic
REALEKIRKVIKEVKDTHRDLLRRVRDVIRRIREASKETERSHREVIERVRKRLDELTK

SEQ ID NO: 19741 - protein, 61 aa, Artificial Sequence
  Synthetic
KSVDDIIREIRKLLEDHKRRVDELLERLKKLLEDHRRTVDKLIKDLERLLEELARRVKREG

SEQ ID NO: 19742 - protein, 59 aa, Artificial Sequence
  Synthetic
REALERIREEVRRVEEASERTLRELEKVVRRIERESEKLKRELEKVVEDAKRTLEKLIE

SEQ ID NO: 19743 - protein, 61 aa, Artificial Sequence
  Synthetic
SSIEKLLEELKELAKRHEDEVKKLIRELEDLARKHKERSEKLNEEIKKLLKELADRVRERG

SEQ ID NO: 19744 - protein, 59 aa, Artificial Sequence
  Synthetic
ERVRRRLRKVVEEIKERSDRTIREMEKVIREIKEESRRLNKSHEEVIRDVKRRADELRK

SEQ ID NO: 19745 - protein, 61 aa, Artificial Sequence
  Synthetic
SEVEDLLRDLERLLEEHRERVERLIKRLRELLERHKRTVEKLNRDVKEKLRKLKKEAEDKG

SEQ ID NO: 19746 - protein, 59 aa, Artificial Sequence
  Synthetic
EEALRRLKRVVEEIKRRSDRLIEKAEEVIRDIEEKSEETLKSHREVLERVKKILTDLRK

SEQ ID NO: 19747 - protein, 61 aa, Artificial Sequence
  Synthetic
DEIDRLLEDLRRLLEEAERRVTEIIKRIKKLLEEHERRVRELNKDLRRLLEEAEDVVRRKG

SEQ ID NO: 19748 - protein, 59 aa, Artificial Sequence
  Synthetic
EKARRDLERVVTEIDRELKRLEEDIRRVLEEVKRRSEDLRRSHRRVIEDIKRRLEELRR

SEQ ID NO: 19749 - protein, 61 aa, Artificial Sequence
  Synthetic
KEVEDIIREIRKLLEDHERKVKELIDEIRRLLEEHERTVRDLNRRIKKLLEEAKEFADRKG

SEQ ID NO: 19750 - protein, 59 aa, Artificial Sequence
  Synthetic
KEMIDRVRKVVEEVKKRSRETLERIRKVIEEVKARSKELIESHEEVIKRVEETLKRLKD

SEQ ID NO: 19751 - protein, 56 aa, Artificial Sequence
  Synthetic
SLEEEIKKLLKEVRDVNDRLKETIEDLAEKIERLAKRMIERIEEILREVDRLVKEV

SEQ ID NO: 19752 - protein, 59 aa, Artificial Sequence
  Synthetic
EDVIREILKEIRKHLRDSEEENKKTLDTLRKILEDLTKAAEDILEEIRRELDRLRKEAT

SEQ ID NO: 19753 - protein, 60 aa, Artificial Sequence
  Synthetic
SELEDILRRLREEVKRLREESRKLLEDNRRLVEEVKRESDKVLKRLKDKADRLKELAERG

SEQ ID NO: 19754 - protein, 55 aa, Artificial Sequence
  Synthetic
REIKTVIDELTRELERLNREHEDLTRKLREELKKLNKRIKDLIDTLKKLLEDLKK

SEQ ID NO: 19755 - protein, 56 aa, Artificial Sequence
  Synthetic
SEEEKLRELVKEVEKRTRELNENLRRSIEEVERDTEELDKNLEKSIREVKKVLDDL

SEQ ID NO: 19756 - protein, 56 aa, Artificial Sequence
  Synthetic
AEDVLRRIRELLERNEEVNRRLDEASKRLLEENRRKNKKLDDDSKELLKRLTERAK

SEQ ID NO: 19757 - protein, 56 aa, Artificial Sequence
  Synthetic
REKERLEKVIRELETKARELNKNLKKSIDDVRRETERLNENLKRSVDELRKRLKDL

SEQ ID NO: 19758 - protein, 56 aa, Artificial Sequence
  Synthetic
AEEVLKELRKLVEELERRNRELDKRSKDLLRENRELNKDLDRKSRELMERVERKTR

SEQ ID NO: 19759 - protein, 56 aa, Artificial Sequence
  Synthetic
SEEEKLERLIEDLERKLKELNDNLKESIDRVRKRTEELNRNLRESIKRVKEELERQ

SEQ ID NO: 19760 - protein, 56 aa, Artificial Sequence
  Synthetic
AEEVLRELEKLVEDLERENRRLDKESKDLLEENKKVNKDLDDESKRLLEEVSKEAK

SEQ ID NO: 19761 - protein, 61 aa, Artificial Sequence
  Synthetic
SDKEDVTRLLEEVSRASERSRKRWKDSSDEVKRTSEESIRRLRELLERLRERIERVIREKK

SEQ ID NO: 19762 - protein, 56 aa, Artificial Sequence
  Synthetic
VDELRKKIEEIVKRDEDLVRRLLEDSKRLAEEDRRLLEEVKREIDEIRKRIDEEVK

SEQ ID NO: 19763 - protein, 61 aa, Artificial Sequence
  Synthetic
DEIDELVRRIEELAERHHRRVDEIVKRNEEVLKELDERARRLVRENEEVLKRLEETVRREG

SEQ ID NO: 19764 - protein, 59 aa, Artificial Sequence
  Synthetic
ERAEKRLRDVLEKLRRDVERNREEIKKSAEDVRREVKRVTDELKESIERVRKRVKELKD

SEQ ID NO: 19765 - protein, 59 aa, Artificial Sequence
  Synthetic
EAERKVKTVVDELRRIVDELAKELEESLKRTDETIKRLARELERVDRELEEIIKELERK

SEQ ID NO: 19766 - protein, 55 aa, Artificial Sequence
  Synthetic
DEVVRKVEEEAERIKKRIKDLVRRDEKLVEDMRRRIKRLVEKNRKVAEKMRTDTD

SEQ ID NO: 19767 - protein, 60 aa, Artificial Sequence
  Synthetic
DLEELLRKVLEELRKIVEDARRENEKSLRESEKIVREVEELNKKVLEEVEKKIREVIEEK

SEQ ID NO: 19768 - protein, 59 aa, Artificial Sequence
  Synthetic
EETIKRIVDEIRKEAERLLRRHRKSVKEDKDLAKKIREDHKKSVEDIERTLEELEKRAK

SEQ ID NO: 19769 - protein, 56 aa, Artificial Sequence
  Synthetic
SEIEELVKEIKKVADEVRRRHEKSVREIERKLEELDKKVKDLVDEDKKLADELRRR

SEQ ID NO: 19770 - protein, 59 aa, Artificial Sequence
  Synthetic
DRVRRELERVLRDVERIIRDVKRTNKRVDDDVERRIRELRKELEDSLRRSKRIVDEVRR

SEQ ID NO: 19771 - protein, 57 aa, Artificial Sequence
  Synthetic
SEIERLVEEIEKLLRKMAEEHKRSVERDERLARKLKRENEEHIKTDEELVDRLRRRN

SEQ ID NO: 19772 - protein, 59 aa, Artificial Sequence
  Synthetic
DRVLRELKRVLDEVKKIIEDVAKENEDSDRRSKKIIEDVVRENKESLDRSREEIERVRK

SEQ ID NO: 19773 - protein, 56 aa, Artificial Sequence
  Synthetic
KEIEELVKRIEDEARRLKEEHKKSVREIEELLKRLTEEVRKLVERDKKLAEDLKDR

SEQ ID NO: 19774 - protein, 59 aa, Artificial Sequence
  Synthetic
DEMLRLLEKVLRDWEEIVRRVKEANDDVNRRVEETLRDLKRKLDRSLEDSERIIREVAT

SEQ ID NO: 19775 - protein, 59 aa, Artificial Sequence
  Synthetic
SVEDELRKVIKENEDVLREVEERVETVIKRNREVIEEVAREVERVIEETRRLLKEIEKA

SEQ ID NO: 19776 - protein, 59 aa, Artificial Sequence
  Synthetic
EESIKRLLEKIRKHSEEVKETIRRLLEKIEEHTERVKREIDKMLRSNEDLMRRIKEEAE

SEQ ID NO: 19777 - protein, 59 aa, Artificial Sequence
  Synthetic
SIKEKLDEAIERNERVLRRVEEEVRKSNEKNKEVLRRVSEEVRKVIEELEDLLRKIAEK

SEQ ID NO: 19778 - protein, 59 aa, Artificial Sequence
  Synthetic
DETAERLLRKIEKHSREVDETIRRMLEEDERHIKEVEDTIREMLERLKRLIDEAEKDAK

SEQ ID NO: 19779 - protein, 60 aa, Artificial Sequence
  Synthetic
DEVREVLKKIRELIKTNREHVTRLLRTIEELSRRSEEMIRRILEEIEKLIKDVRRLTEEG

SEQ ID NO: 19780 - protein, 59 aa, Artificial Sequence
  Synthetic
EEMEKLLEEAIKEAREDSRRSDREVEEVLRKHKKVNDRVREEIERVLRKLEELLKKDRT

SEQ ID NO: 19781 - protein, 59 aa, Artificial Sequence
  Synthetic
SEVDEIVRRLEELIRRNTEKVERLLERHERLIRELKERVKELLRKHEELAKEITELTKR

SEQ ID NO: 19782 - protein, 59 aa, Artificial Sequence
  Synthetic
KEARDRIRKVLEELKKKNKELEERIRKVSKELEKVLEDVKRESEKVSKELRERLERSKT

SEQ ID NO: 19783 - protein, 59 aa, Artificial Sequence
  Synthetic
SELERLEKEARDIVENLKRVLEELAKDVKRLLKESDELLKDLREKVREILERIEELARR

SEQ ID NO: 19784 - protein, 59 aa, Artificial Sequence
  Synthetic
ETAKRELERLVKELRDVHREVEKRLKELAKELREVNKRIKDDLDRLVEALEEVLDRVRR

SEQ ID NO: 19785 - protein, 59 aa, Artificial Sequence
  Synthetic
SELEELKRRIDELLKENEEILRELEERVRRLNKENRDLLRKLEEEAKRLVEEVRRVAEE

SEQ ID NO: 19786 - protein, 58 aa, Artificial Sequence
  Synthetic
EVKERIEKVLKDLERRNRESEKEVRRLLKELKESIDDSRRRVDELVKRLRKVLEDIRR

SEQ ID NO: 19787 - protein, 61 aa, Artificial Sequence
  Synthetic
SAEETLEKLIRDLEKSIRKSAEDLERLIRELEKSVRDSAKLLRDLIREVRDVVRDVVRAKG

SEQ ID NO: 19788 - protein, 55 aa, Artificial Sequence
  Synthetic
KDVAERVKELDKRNKDLLKRLEEEVRRLIKENERLLRELAKEVKELLERIKRAAG

SEQ ID NO: 19789 - protein, 61 aa, Artificial Sequence
  Synthetic
SAEDKLRELEKKLRKSIKESADRLRKLNEELRRSVRESAERLKELIREVEEVLRDVVRKRG

SEQ ID NO: 19790 - protein, 55 aa, Artificial Sequence
  Synthetic
EEVEDEVRRLDEENKKLLEDLKRSVDELIERNKRLLEELTKRVKELLDKIRKTAE

SEQ ID NO: 19791 - protein, 61 aa, Artificial Sequence
  Synthetic
SMEDSLRELIRKLRESVKRSAEELRRLNKRVEDSIRDSARKLRELIRRVEEVVKEVVETRG

SEQ ID NO: 19792 - protein, 55 aa, Artificial Sequence
  Synthetic
ERVEDDVRRIDDENRRLLEELKKSVDELDKRNEELLRRAEKEVRDLLREIREAMR

SEQ ID NO: 19793 - protein, 60 aa, Artificial Sequence
  Synthetic
DAEEELERLLRESERVSRDSARRLRELLKKLRRSVERSRREIDRLLKELEDVIREVIKRK

SEQ ID NO: 19794 - protein, 55 aa, Artificial Sequence
  Synthetic
KDLAREVEKVVKEDEDILRRAEEEVERLIETNRDLLRKVEREVKELVEKVEEDER

SEQ ID NO: 19795 - protein, 59 aa, Artificial Sequence
  Synthetic
SELEELKREVDELTEEHKELLKRLTERVKELSERHKELLERLRERSERLVRRIRELAKR

SEQ ID NO: 19796 - protein, 59 aa, Artificial Sequence
  Synthetic
DEVLRKAEELLRRNNRVIEEIEKRLRELLKENNDVIKEIRERLEKSNKELRDVAREVAK

SEQ ID NO: 19797 - protein, 59 aa, Artificial Sequence
  Synthetic
SELEELKKKVDDSIRENERLLRELTEDVKRLSKEHKDLLKRLEDKVEELIRRARELAKR

SEQ ID NO: 19798 - protein, 59 aa, Artificial Sequence
  Synthetic
DDMLEKAKKVHDEHRKSVEESTERLKELLRRNNEVIKDIARRLDELLRKLEKVVKEIAK

SEQ ID NO: 19799 - protein, 59 aa, Artificial Sequence
  Synthetic
DELRELEEEVRKSIETNRELLERARERVERLSEEHRKLLEKVKEDSDRLVEEVKDLERR

SEQ ID NO: 19800 - protein, 59 aa, Artificial Sequence
  Synthetic
DEVLRRARTLHDEHRRSVEESERRLKELLERNNEVIKDIERKLDKSNKELKDEAEKVKK

SEQ ID NO: 19801 - protein, 59 aa, Artificial Sequence
  Synthetic
SELEEIEKKVRELTKRHRELVERVRKTVKELIETNRRLLETLTERIKRVLEEVRDLERR

SEQ ID NO: 19802 - protein, 59 aa, Artificial Sequence
  Synthetic
DKALEEAKRVLRENNEVIKDIKRRLDELLKELEKSVRESEERLRRLLEEVKRVIEEVAT

SEQ ID NO: 19803 - protein, 59 aa, Artificial Sequence
  Synthetic
SSDREVEERVKRLTDRHRELLKRVEEEVKRSIKRNKDLLDELRKESEKLVKEARDLARK

SEQ ID NO: 19804 - protein, 59 aa, Artificial Sequence
  Synthetic
EDVLRLAEKLLKDNNKVIDEIRRRLDRLHEEHKKSVDDSREELKKSNKKLEEVVREIEK

SEQ ID NO: 19805 - protein, 59 aa, Artificial Sequence
  Synthetic
DDLREVEKEIRRIAEESKKLLEEIERAVEKILRDSRRVLEELARRAKRLLEELDKLKKN

SEQ ID NO: 19806 - protein, 59 aa, Artificial Sequence
  Synthetic
EDVRREVKRLVDELREVDRKIEEDLRELVRELEKVNREIRKRIEELVRRIKEVADEVRR

SEQ ID NO: 19807 - protein, 60 aa, Artificial Sequence
  Synthetic
DMEEKMRRITEEWRRVTEEIERRHREVIKKWRDVSREIAETHRRVIDELRRVLERIAERN

SEQ ID NO: 19808 - protein, 59 aa, Artificial Sequence
  Synthetic
KDIVDKELERLREEIRTSKKESDEVVKENEELIRDSKRKSEKVVRDNKRVIKEAEEKAK

SEQ ID NO: 19809 - protein, 59 aa, Artificial Sequence
  Synthetic
DEIEELLKEIKKLVDELRKRIEELAREHKRLADELRKKIKKLKDEHDRLVRELEKLAEK

SEQ ID NO: 19810 - protein, 59 aa, Artificial Sequence
  Synthetic
KEVKDKLDKLREELKRVADKLRDDLRELHKRLKEVADRLRKLLEDANRTLREVLKETKR

SEQ ID NO: 19811 - protein, 61 aa, Artificial Sequence
  Synthetic
SAEESAKRLKEELKKSLDRSREELDKLRKDNEKVLRDVEERLRRLIEELKKVLEDIKKDKG

SEQ ID NO: 19812 - protein, 55 aa, Artificial Sequence
  Synthetic
EELEKRVEKLLRDDKRRLDELRKESEDHIREIEDTLRRIEEEVKRLLKEMRDKLK

SEQ ID NO: 19813 - protein, 59 aa, Artificial Sequence
  Synthetic
SELETIARRVEKLNEDVERLLREAKKEADRLIKENEDLLREAERKVREIIERIRRLAER

SEQ ID NO: 19814 - protein, 59 aa, Artificial Sequence
  Synthetic
KEVKEKLTRLLKSHEDVIREVSRRLKELLDRYREVSDRIRKTLEELLKELRRVVEEVRK

SEQ ID NO: 19815 - protein, 59 aa, Artificial Sequence
  Synthetic
KDLEEIERKVRKLNEDDKKLLDDLRKEVEKALRRNEESLRKSREDAKKIIKEIEDLARR

SEQ ID NO: 19816 - protein, 59 aa, Artificial Sequence
  Synthetic
KEMKDALRELLRSHRKSSEDTKRELERLLREYEKVSRDVKRDHEKLLREIREVIEEVKK

SEQ ID NO: 19817 - protein, 59 aa, Artificial Sequence
  Synthetic
SELDEIRRRVEELIETDKDILRRIAEEVRKALEDNKKSLRESEEEVRRLLEEIKKLADR

SEQ ID NO: 19818 - protein, 59 aa, Artificial Sequence
  Synthetic
EEMKKLLEDLLRKSEDSTRETRKRLKELLDRYEEVSKKIKKRHKELIEELRKVIDDVRR

SEQ ID NO: 19819 - protein, 59 aa, Artificial Sequence
  Synthetic
RVEETLTRALKEIEEVIRRVDEESKRTIRSHREVIREVDEIHTRLLERLKKVIDDIRRR

SEQ ID NO: 19820 - protein, 59 aa, Artificial Sequence
  Synthetic
DRLLKEARDEVRKIIEEIRRLLEEHERTVKKLNEDIRKRLEESERTVEELLKRLRDRAR

SEQ ID NO: 19821 - protein, 59 aa, Artificial Sequence
  Synthetic
SMEEELKRLLESHEKVIREVRKTSEDTLRSHRKVIEEAKEEHKKLLEEIKRVVERVRKR

SEQ ID NO: 19822 - protein, 59 aa, Artificial Sequence
  Synthetic
ETVLREARKEVEKLNEDIRRLLEEHKRVVDELNKELRRLLEESRRRVKELIRRIEEEAR

SEQ ID NO: 19823 - protein, 59 aa, Artificial Sequence
  Synthetic
SVEERLRELIESHRRVIEKVERDSRRTIRSHEEVIKEVKKISEDTLREIRKVIEEAKKR

SEQ ID NO: 19824 - protein, 59 aa, Artificial Sequence
  Synthetic
ETLLRDAERRVEELNEEIRRLLEKHVRDVDRLNKEIRDLAREHKERAEEIIKRIEEKAR

SEQ ID NO: 19825 - protein, 59 aa, Artificial Sequence
  Synthetic
SEMERLERRARELLRRNEELMDDLRRKAEELLKRNDRLVKEIEKKVREVLRRIEELKRR

SEQ ID NO: 19826 - protein, 59 aa, Artificial Sequence
  Synthetic
KRLEELLRRLNEEHKRISDELRKLLDEALERHRELSRRLEEELERLLREIERLVEEVTR

SEQ ID NO: 19827 - protein, 60 aa, Artificial Sequence
  Synthetic
DDMERLEEEIKEILDRLRRLLERNRRVNKEIDERSKELVKRLEEKARRLLEELRRLKDRV

SEQ ID NO: 19828 - protein, 59 aa, Artificial Sequence
  Synthetic
KELEKKAEDVLREVKKVIDEVRTDSKRLNENLRESIKDVKREAERVLREVEEAIREVER

SEQ ID NO: 19829 - protein, 60 aa, Artificial Sequence
  Synthetic
REAEELKKEVDRILEELKKLLKENEDLNRDLDRKSKELLKENREKVERLRKELRELKDKV

SEQ ID NO: 19830 - protein, 59 aa, Artificial Sequence
  Synthetic
KELEDEAKRLKDEVEKLIEEIKRKSDELNKNLRDSIRRVEETTRDLLRKIKKLIDEIKK

SEQ ID NO: 19831 - protein, 57 aa, Artificial Sequence
  Synthetic
SIEEALEDLARRIKKILDDLRREAERLLREVEELLKRVEEANRRLRRTIEEALKRLA

SEQ ID NO: 19832 - protein, 56 aa, Artificial Sequence
  Synthetic
VETAEREIRRILEEIRRLAEEARRRIEEVLKRIKKHLEESKRRNEESLERIEREAR

SEQ ID NO: 19833 - protein, 60 aa, Artificial Sequence
  Synthetic
SVEETVDELKKRIEKILREIKRVNEELAKRNEDVNEEWRREVDKMIKDIERILRDVLRKE

SEQ ID NO: 19834 - protein, 56 aa, Artificial Sequence
  Synthetic
IEKLKRDAERILEEIKRAVDTSREESERTLKELRDMVKESRKDAEEVLERIDRDKR

SEQ ID NO: 19835 - protein, 60 aa, Artificial Sequence
  Synthetic
SVKETLEDLIKKIRDLLKRVRDENKRLAEDNERLNREVEKRNRELIKRIEDELEEVRKRE

SEQ ID NO: 19836 - protein, 56 aa, Artificial Sequence
  Synthetic
IRDLKREIEKILREIKKALEDSRRKSKETLDRIREVLKTSEEDIKRILKEIREAAR

SEQ ID NO: 19837 - protein, 61 aa, Artificial Sequence
  Synthetic
SREEVVKEIEKRVEELNRRLEETVRRVIEEMKRLNKESKEVSKKIVDEVRKLLDDVRREKG

SEQ ID NO: 19838 - protein, 56 aa, Artificial Sequence
  Synthetic
EDELRRLLERIEKTVRELKREIEKILEDATRTVEDLKRKNEELLRRLKKLADDVKK

SEQ ID NO: 19839 - protein, 59 aa, Artificial Sequence
  Synthetic
RVEEILRKASKENKEVIDRDRRLAEEATELNKRVVEEDRKVMKEVTKELEDVLRRAREE

SEQ ID NO: 19840 - protein, 59 aa, Artificial Sequence
  Synthetic
DKLLRELEERSKKVLEESKKTSEDLLRESEKHVRDWREKSRKLEEKVKRLVKKVKDTTD

SEQ ID NO: 19841 - protein, 60 aa, Artificial Sequence
  Synthetic
RAEDIIRELKRRNEEVLERDRELMERAARELREVLERLKDIAREASKELKRVLDELRKRG

SEQ ID NO: 19842 - protein, 59 aa, Artificial Sequence
  Synthetic
DEVVERLARESERVLRESEETSKDLKRKVDEELRRIEDTIRRLLKRVKDLVKKIEDTSR

SEQ ID NO: 19843 - protein, 60 aa, Artificial Sequence
  Synthetic
RLREIIEKLRRDNEKVIEEDRRVAEEVRKALEKVLREDRKMADEVTKELERALKELEDRG

SEQ ID NO: 19844 - protein, 59 aa, Artificial Sequence
  Synthetic
DEVIKELEKRSKDVLDESRDESRKLLERVERLLKKIREDSERLLERVEELLREAEETAR

SEQ ID NO: 19845 - protein, 60 aa, Artificial Sequence
  Synthetic
SVEEIIRKLEEDNRDVLRRDREVAKKVEDENRKVAEEDDRIVRRVAEELKRVLKELEDKG

SEQ ID NO: 19846 - protein, 59 aa, Artificial Sequence
  Synthetic
EKVIEELKDESRKHLEELEKDSKRLEDESKKHLDDWRRTSEKLLEDVERRVREIEEESR

SEQ ID NO: 19847 - protein, 60 aa, Artificial Sequence
  Synthetic
SSEEVVRELDKEIRKSIEDLKRIVRENEEENKRSVEDVREKAKRNEERLRKVLKEADERK

SEQ ID NO: 19848 - protein, 56 aa, Artificial Sequence
  Synthetic
IRELAKRVKRIVDENKRVAEEHHRKVERIVRENEKLLKEHHDRVEELVRRIKEEVE

SEQ ID NO: 19849 - protein, 57 aa, Artificial Sequence
  Synthetic
SEEEEVRRVLEELEKKVKRLTEEHRRRLDELRKKVKDHSRKNKELLERLREEIKRIK

SEQ ID NO: 19850 - protein, 59 aa, Artificial Sequence
  Synthetic
EEAKRVLEEVEKRVRELVKTNEDVLREIEEDVRRLVKENEDSIKESKDRLRELLERLKQ

SEQ ID NO: 19851 - protein, 59 aa, Artificial Sequence
  Synthetic
DEVEEIRKILEELAREAEKVVRETRKLLEDIRKEVEELNDRNRRLLEELERRVRDIKRR

SEQ ID NO: 19852 - protein, 59 aa, Artificial Sequence
  Synthetic
DEIRRVVEDVERRLRELLDRWRKVSEEVEKRLKELIDELRESIERSADRLRKLIEELKR

SEQ ID NO: 19853 - protein, 59 aa, Artificial Sequence
  Synthetic
REVEEIKKTLEDIRREAKELLDRTRELLDRLRKSVEELNRDNERLLREAKDEVEKVKRD

SEQ ID NO: 19854 - protein, 59 aa, Artificial Sequence
  Synthetic
EEIKKVVERVEREIEDLIRRWEEVSRDVEEKLKDLNKKVEESIRRSAKDLRELLREVEE

SEQ ID NO: 19855 - protein, 61 aa, Artificial Sequence
  Synthetic
SRAEKVLKRVTDLIRELLRTVTELVRRNREVIEELLRRVAKLHRDNRELNKKVLEDVRRDG

SEQ ID NO: 19856 - protein, 55 aa, Artificial Sequence
  Synthetic
EVVDELRRRIREVEKTLDRLLEESEERARRVLKELDRLLEESRKSSREVIEEAKR

SEQ ID NO: 19857 - protein, 56 aa, Artificial Sequence
  Synthetic
SVEELLKKLEKENRDVIREMKKLLDELEEENRRVIEEWRRITKELEDRNRRVREEI

SEQ ID NO: 19858 - protein, 59 aa, Artificial Sequence
  Synthetic
EEIIRRLVKHNKELVDEIRKTIERLREHNRKLVEKVREDVKRSTKHNRDLVKEVRDRAK

SEQ ID NO: 19859 - protein, 56 aa, Artificial Sequence
  Synthetic
SLEELLDRLRKLNETVIRDMERVLKELEERNRKVIKEDRDVLEELARRNEKVKRDI

SEQ ID NO: 19860 - protein, 59 aa, Artificial Sequence
  Synthetic
EEIAKELVKHNEKKVREIKKTIDDLRKHNEELVKEIRETSERLREHNERLLREALRRAK

SEQ ID NO: 19861 - protein, 60 aa, Artificial Sequence
  Synthetic
DLEEVVKDLERKLRDVARKDRKLVEDSRKILKDVVDKDRELVERSRRILEEVLERIRRRG

SEQ ID NO: 19862 - protein, 59 aa, Artificial Sequence
  Synthetic
RDTARKLLEDVADELRRWLEDSERLHKENKDTIEKWLRRSRKLHEENRKLIEDLLRTVT

SEQ ID NO: 19863 - protein, 59 aa, Artificial Sequence
  Synthetic
SLEDVLRELKERLERSHRKLRELVRRLEEDLKRVLRELEKIVDEVRKINEDVRREVERR

SEQ ID NO: 19864 - protein, 59 aa, Artificial Sequence
  Synthetic
EDIVRKLLEDVRKLVEELDRRAKELEERVKKVVDELLEKARRLLEKNRRTVEKILRDVK

SEQ ID NO: 19865 - protein, 60 aa, Artificial Sequence
  Synthetic
SEVEKLLREVEDRDRRILKKVKELLDEVRRLIEDHLRRSEDALRRVRKRIEELKELVERG

SEQ ID NO: 19866 - protein, 59 aa, Artificial Sequence
  Synthetic
ERLEEMLRRLKKSIEDSVREVRKVLKEAKDIARKVIEDTKRLLEELKRIMKKVLDELRK

SEQ ID NO: 19867 - protein, 60 aa, Artificial Sequence
  Synthetic
SEIEELVERVKARDEKHLRDSEKLLEEVKRRDRKLEEDSKKLLKDVKDLLRELEEVAKRG

SEQ ID NO: 19868 - protein, 59 aa, Artificial Sequence
  Synthetic
ERLRKLLDDLRKSIEESRKRSEEILREAEDTMRKSVETNERLLEELERELRRVVEELRR

SEQ ID NO: 19869 - protein, 60 aa, Artificial Sequence
  Synthetic
DEIERVLEEVERIDRELLKRSEDLLREVRERDKELEERSKRLLEKARRLIETLRDMARKG

SEQ ID NO: 19870 - protein, 59 aa, Artificial Sequence
  Synthetic
ERVKTIIDEARKSIDDSVRENKKVLDELKETIERSKKKNEDILREIEKILEEVREELRK

SEQ ID NO: 19871 - protein, 60 aa, Artificial Sequence
  Synthetic
KDVDELLERVKRRDEELERKVEKLLKRVRDLIREHDEKVKELEDEVRDRIKKLLEMAERG

SEQ ID NO: 19872 - protein, 59 aa, Artificial Sequence
  Synthetic
EELERVLRELKRSIETSTRRLRKILEELRRILEESERKVEEVLKELERIAREVEERLRT

SEQ ID NO: 19873 - protein, 60 aa, Artificial Sequence
  Synthetic
SDIEDVVRKVEEEVRDHNRRVEELLKRVERRDRRLEETVEELLKEIEDKLRRLKEMAERG

SEQ ID NO: 19874 - protein, 59 aa, Artificial Sequence
  Synthetic
ERLEKLLRELEETLRRSKERVKEVLEDLKRTITESKRRLKKILDEIRKRLEEVERDLKR

SEQ ID NO: 19875 - protein, 60 aa, Artificial Sequence
  Synthetic
SLEEVVDKLRRDSEESLKKNETVLRRVTKELTELLKRWREASERLKEELREVLERVRKKG

SEQ ID NO: 19876 - protein, 59 aa, Artificial Sequence
  Synthetic
EDTLRKLAEEVKRVVRDDEEKVKRLEEEVKEEVKKLEDDLRRSEERVERTIREIEKRAK

SEQ ID NO: 19877 - protein, 60 aa, Artificial Sequence
  Synthetic
SVEDLVREVERRLKTVLDEDEEVLKRVEDESRESIKENEEVLREVSERLDKVLKDVRRRG

SEQ ID NO: 19878 - protein, 59 aa, Artificial Sequence
  Synthetic
EEDLKRLEDRVEEEVRRAKRESDELLKRVRRTVEDDKRRLRELREEVKDLLERIREAEK

SEQ ID NO: 19879 - protein, 60 aa, Artificial Sequence
  Synthetic
SEVDEVRKRSEKVVEENERRIEESERRIAKLVKEVRDVIEDAKRRVEEILRRLEEEMRKG

SEQ ID NO: 19880 - protein, 56 aa, Artificial Sequence
  Synthetic
KDVLEEMRKTHERVIKEWERAHKEVNEKLEKIIRELEKVLEEVEDEAREVIRRLET

SEQ ID NO: 19881 - protein, 59 aa, Artificial Sequence
  Synthetic
SASEDLERVLRELAKEVEKLLRESEKLLKELEDLARELLERDRKLLKELEEKVKRLKER

SEQ ID NO: 19882 - protein, 56 aa, Artificial Sequence
  Synthetic
ERVLDDVRKRIEDLVRELKKVNEDIEKKVRELIERLRRSLEKSKEDIRRLVEELRR

SEQ ID NO: 19883 - protein, 60 aa, Artificial Sequence
  Synthetic
DMSEELEEILRRLEEESRRHLRTDEELLRELEEKIRRLLREIEEILERLKKRIDEVKTRN

SEQ ID NO: 19884 - protein, 56 aa, Artificial Sequence
  Synthetic
ERVLKRVKDRIDELIRRNEESLERTRDEIRKLIEELKKVLDRVKEEIEKLVEALKK

SEQ ID NO: 19885 - protein, 59 aa, Artificial Sequence
  Synthetic
EMTERLERVLEELKRKSDEHIKTDEELLRRLEKKSRDHLRELEEILRRLEREAREVKRN

SEQ ID NO: 19886 - protein, 56 aa, Artificial Sequence
  Synthetic
REALKKVEDAIDKLRRDNERSLERTKREIERLIRENKDVLDKIEKRIRELIEELER

SEQ ID NO: 19887 - protein, 59 aa, Artificial Sequence
  Synthetic
SADEKLDKILREMKKRSDDHIREVEKILRDLDREVKEILKKDEKLLRDLDRRVKDVKRR

SEQ ID NO: 19888 - protein, 56 aa, Artificial Sequence
  Synthetic
DEVLKRVEETVRRLVEENKKVLDRVREEIRKLIEELRDSLRRSEKRIRELADELRR

SEQ ID NO: 19889 - protein, 59 aa, Artificial Sequence
  Synthetic
DLEDILREIARLIERLIDENRKVLEEIARRLKELIEELKKSLKRSEELLRRLEKELKDS

SEQ ID NO: 19890 - protein, 59 aa, Artificial Sequence
  Synthetic
KDLLRTLEKVAEDLKRRSERHIRELRRTLEDLERDVRRLLREDEEKLKRAAEEVKEAIK

SEQ ID NO: 19891 - protein, 59 aa, Artificial Sequence
  Synthetic
DLEDVLRDIERLLRDLIRRNKEVLDRIRELIKKLIDENRKSLKRSKEELERLIRELAKS

SEQ ID NO: 19892 - protein, 59 aa, Artificial Sequence
  Synthetic
EELLRRLREVLERLKRESEKHLEELKKILEDLERESRRHIEEDKRLLKELKEEVDERIR

SEQ ID NO: 19893 - protein, 59 aa, Artificial Sequence
  Synthetic
SLEEVLKRIEDELRRLIEENKESLERSERLIRELKKRLEEVLRRIKKLLEELIRRLEES

SEQ ID NO: 19894 - protein, 59 aa, Artificial Sequence
  Synthetic
KKLLEDLKRTLDELRRESEEHIRRDERLAEELAREVEKLLKDMERILRELAKEVEDRIK

SEQ ID NO: 19895 - protein, 55 aa, Artificial Sequence
  Synthetic
DASRRVEEKLKEVEERVRKLLEEDRKRLKDSKRKVEELIERDKTELKKVKDRADG

SEQ ID NO: 19896 - protein, 56 aa, Artificial Sequence
  Synthetic
KKVIDTVRKRLKELLDELKKSVEDTHRENRRVLKELEESHKRTNERLDDLLRELER

SEQ ID NO: 19897 - protein, 59 aa, Artificial Sequence
  Synthetic
SLEDVVRRVREELERLLRTHEEVIRRVEEELRRLLEEYRKVSKEIEEDLRRLLKEVRDR

SEQ ID NO: 19898 - protein, 60 aa, Artificial Sequence
  Synthetic
VEDLLREIKKELEDVKRKVDKLNEEVERILKKAKDEVKEAIKENRDRLRRLRDEVRRLKK

SEQ ID NO: 19899 - protein, 59 aa, Artificial Sequence
  Synthetic
GLEDVVRRVEKRLEDLLRRYKKVSERLEREHRRVLDEYRKVSEEIDKILRDLLKEVRDS

SEQ ID NO: 19900 - protein, 60 aa, Artificial Sequence
  Synthetic
VEELLKEIEKLLKDIERTVEKALKENKDSIRRSKEKVDRMIKRNRELAKELEDKVRELKR

SEQ ID NO: 19901 - protein, 60 aa, Artificial Sequence
  Synthetic
SIEDILRELADTIRRLTEESEKILRKAEELLRRLTEEWRKSLKDLEDLIRKLIEEIRRRG

SEQ ID NO: 19902 - protein, 55 aa, Artificial Sequence
  Synthetic
EEIKKLMDEIRKKVEKHLREVEKVLREVEEEVKRELRKSEELARRIEEKIRREKK

SEQ ID NO: 19903 - protein, 61 aa, Artificial Sequence
  Synthetic
SEVEEALRRMEETIRRVREKLKKSLEDMRREIERIRRELEKSLEEFERDIERITRDIRRRG

SEQ ID NO: 19904 - protein, 56 aa, Artificial Sequence
  Synthetic
DDALRKIEELVKRLDRELREVNKEIEKVVRELKEELKRVDDEIERLVRELRKEAER

SEQ ID NO: 19905 - protein, 59 aa, Artificial Sequence
  Synthetic
DEIDEIRKVAERLEKEARELVKENEDDLKRHKERVDEIVKKIEEKVRRLEETARKLKEE

SEQ ID NO: 19906 - protein, 59 aa, Artificial Sequence
  Synthetic
EELKKVLEDLRRVLEKVHKLNREVLDKHREIVKRLSDKIKTVLRKLEEILKRAEEELRR

SEQ ID NO: 19907 - protein, 56 aa, Artificial Sequence
  Synthetic
SIEELLEEVERVVREVERRLDELLERNRRVIEEVRRRDDKLTKENEDVIRDVRRAG

SEQ ID NO: 19908 - protein, 60 aa, Artificial Sequence
  Synthetic
EEDLIREVEKRLEDIKDLLRRMKEEVERHSREVEDRLRRSEERWRDHSKKVKERLDRATT

SEQ ID NO: 19909 - protein, 59 aa, Artificial Sequence
  Synthetic
SLEEEVRRLLEEIKRLADENRDYVRRSLETNKKTNKDNRDEIRKALERIKRLAREIERI

SEQ ID NO: 19910 - protein, 56 aa, Artificial Sequence
  Synthetic
EKLLREVEELLRRVEEEHERLHRENRKLNDKDRETLERLIREVDDLLRKLEEEARR

SEQ ID NO: 19911 - protein, 57 aa, Artificial Sequence
  Synthetic
RVDELLEEVRKLVKDVHDTTEELLKEVERRLDEVKKRVDRSNEEVKELVKEAVKRSG

SEQ ID NO: 19912 - protein, 56 aa, Artificial Sequence
  Synthetic
DTKIEELLRRIEKYMRESKERIDRLLERIDEVLEKNERDVRKLLEDIRRMIEKDDT

SEQ ID NO: 19913 - protein, 59 aa, Artificial Sequence
  Synthetic
DTIERLLEDIKRILDKNRRDARRVLEEIKRSNEKNREDIKRIEEEIDRLLKEIKKKAEE

SEQ ID NO: 19914 - protein, 59 aa, Artificial Sequence
  Synthetic
KDVVKEVEELLKRVEETHRKLNKEVEELLERDERDLRRLIDDVRRLLEEVRKTLEDLRR

SEQ ID NO: 19915 - protein, 59 aa, Artificial Sequence
  Synthetic
RELEEARERIKELLEEIKDEVRRWREKIKRLLEDSRRKAERLKEDIKRLLEEIKKLSDD

SEQ ID NO: 19916 - protein, 59 aa, Artificial Sequence
  Synthetic
EDALRDIERLLREVDDAFRRLVEELRRLNEEVHRTTDELIREVEDMLRKVEEALKREKD

SEQ ID NO: 19917 - protein, 57 aa, Artificial Sequence
  Synthetic
EEIERVLEEIKRTADEIRKEIERVLEKSKKLLDDHHEEVKRMLERIRDKAKKVTDRG

SEQ ID NO: 19918 - protein, 58 aa, Artificial Sequence
  Synthetic
KVVEELRKILERLKDLVRDLERKLDELNKRVRDRVEENRKELEKLLREARDRIRELER

SEQ ID NO: 19919 - protein, 60 aa, Artificial Sequence
  Synthetic
SLEDRLREVLKRYEDRSRDLERELKRVLDEYDDSSRKVAEELKKVLDEIRETVERIKKDV

SEQ ID NO: 19920 - protein, 59 aa, Artificial Sequence
  Synthetic
EKEVADLVKKLEDDLRRTSDKVRRVVEEIKRRLEELERRYKALVKKLRDKLREIKEEVR

SEQ ID NO: 19921 - protein, 61 aa, Artificial Sequence
  Synthetic
DVEEELKKVDDKVEELVRKVIEDIRRALERVRELVERVRRKLEETNKKLKKLVEDIVRKKG

SEQ ID NO: 19922 - protein, 58 aa, Artificial Sequence
  Synthetic
EKVEELLRKSEELAKRIEDDVRRVLRKLEDTVRRIKEEIDRLLKDNERIIEEVKRRAD

SEQ ID NO: 19923 - protein, 61 aa, Artificial Sequence
  Synthetic
SVEEIIEDMLRKVRELVRRVRELLREVDEKLKKLVEDVRRRLEKTNKELKDLVEDIVRRSG

SEQ ID NO: 19924 - protein, 58 aa, Artificial Sequence
  Synthetic
EEAKRVLDKLRKTAEDIKRTIDELLKRSEETIKKIEDKIDKLVKKNKELVKRIEDEAR

SEQ ID NO: 19925 - protein, 60 aa, Artificial Sequence
  Synthetic
SLRELLDEVRRAVEESNRELERLLEEVDRSNRESHRELKRLLEKIKKLAEEVERELERKG

SEQ ID NO: 19926 - protein, 60 aa, Artificial Sequence
  Synthetic
EEEVKKAVEDLKRLVDTHKKRVEEVIDELRKHSEKHSEEVRRVITELARRLEELLDEIRR

SEQ ID NO: 19927 - protein, 59 aa, Artificial Sequence
  Synthetic
SAEEKVEDELRKHHEEVKRLLEEIEKTMRDHHREVEETLKDSRRELKRIEEEARKVKER

SEQ ID NO: 19928 - protein, 56 aa, Artificial Sequence
  Synthetic
EDILRKLEEEVRRNDKELRDLLEELKDLVRRNDEELRKLNEEVRKRVEELIEELRR

SEQ ID NO: 19929 - protein, 57 aa, Artificial Sequence
  Synthetic
SIEEMLKRVKEESKRSNDKIRDVLRKVEETSRRSKERIDKLLRDVERTVEEVIRDVK

SEQ ID NO: 19930 - protein, 60 aa, Artificial Sequence
  Synthetic
EKDVLDRLRRYVEENRRRVEKLIRDLEDAVRRNEDDARRVAKEIEDVVREIKDRVDKTRT

SEQ ID NO: 19931 - protein, 57 aa, Artificial Sequence
  Synthetic
SEVDKKLEDIRRRLEKLERETEESLDRVRKELEDLEKESRESLKRLREDLERVKKTK

SEQ ID NO: 19932 - protein, 59 aa, Artificial Sequence
  Synthetic
KKKADELRRVIEEIIRRLRELDEKHRRLVEEIIRRLEELNREHSKVVEEIARELKKTAK

SEQ ID NO: 19933 - protein, 56 aa, Artificial Sequence
  Synthetic
SLLEELKRSIEESIRTLKELLDRLEELIRRIAEEIRRLLEEHSRKTEEVIRRAEKA

SEQ ID NO: 19934 - protein, 59 aa, Artificial Sequence
  Synthetic
EKVIEELKRKLEEENKRLKKVVEEIAKTLKDLLDEVRRRIEDSLRKLEELLERVERKTR

SEQ ID NO: 19935 - protein, 57 aa, Artificial Sequence
  Synthetic
SLLEKLEKLIRDIKRTVDKLLEDNEETIRRIIRDIERLLKRHSDETREVVRTLKERG

SEQ ID NO: 19936 - protein, 59 aa, Artificial Sequence
  Synthetic
KDVIERIERELRELLKKLKEDADRHNEDAERKLRRLRDTIRRSLKKLEEDLRRLSKEAE

SEQ ID NO: 19937 - protein, 60 aa, Artificial Sequence
  Synthetic
SRVEETLKRLEDELKRIEEEVRKLLDELRRHLEENRRRTEKLLRELREELERVRERVEKG

SEQ ID NO: 19938 - protein, 59 aa, Artificial Sequence
  Synthetic
EKLLRRLERLVREIKRRLEELLKRLADLVRELKKEHERLNRELEELVRRIKERLKEAEK

SEQ ID NO: 19939 - protein, 56 aa, Artificial Sequence
  Synthetic
EEEERIKERLDRSVEELKKSADKMREEIERSEKKLKESADRVRKEIEDALRRIREE

SEQ ID NO: 19940 - protein, 59 aa, Artificial Sequence
  Synthetic
EDVVRRVEELLRRHEEVTKTINREIEELIKTHERSTRELNKEIKELIERLEETIKERTR

SEQ ID NO: 19941 - protein, 56 aa, Artificial Sequence
  Synthetic
KDAEELERRLRKSAEDLKRSAEEMKKRLDKSREDVKRKVEEAKKIVEDLEEDLKKR

SEQ ID NO: 19942 - protein, 59 aa, Artificial Sequence
  Synthetic
EEMVKRLRELLRTHEEITERINRKIEKLLREHEEETKRLLDDLRRLLEELRKKIEEEKR

SEQ ID NO: 19943 - protein, 56 aa, Artificial Sequence
  Synthetic
DEEERIEEELRKSTEKLKESLDRMRRDIEKSAEDLRKSVEDVERDMRRLLEDIEKR

SEQ ID NO: 19944 - protein, 59 aa, Artificial Sequence
  Synthetic
KDALERVRRLLERHERETRRINEEIERLIRRHVEETKRVNKRIKRLLDELKRRIEEKSK

SEQ ID NO: 19945 - protein, 56 aa, Artificial Sequence
  Synthetic
SEEEEIKKRIDDARKELEESTREVRERLRDSMRRLDESLKRVEEEIRKLADDIRRR

SEQ ID NO: 19946 - protein, 59 aa, Artificial Sequence
  Synthetic
EEVVRRVRELLKRLKEEVDRINDEIRKLLEDHKKRTEEVNETIKRLIDRLEEELRRRRE

SEQ ID NO: 19947 - protein, 60 aa, Artificial Sequence
  Synthetic
SEVEKIIEKIRREEDRNRREVEEKLKRIREHVRRNEEDTRRIIRELRELLKEALDRLRRG

SEQ ID NO: 19948 - protein, 59 aa, Artificial Sequence
  Synthetic
EKLLRELEELIRRVKKRHDELLKEVADLVKEVEDRHRKLNEELERVAREIEETLKRELD

SEQ ID NO: 19949 - protein, 57 aa, Artificial Sequence
  Synthetic
SEVETLLDKIRRDNEDLNRRVREELERIRKADEDVNREIEKVLRDIEEAIRKLKRDR

SEQ ID NO: 19950 - protein, 59 aa, Artificial Sequence
  Synthetic
DELVRRLEKILREHEENIKRIVEELERLLEEHKKNLEDLKRRLRDILRKVEEELDRTRK

SEQ ID NO: 19951 - protein, 57 aa, Artificial Sequence
  Synthetic
SETEELVKKIDKRDKEVKERAKRVVDEIKERDKRVNEEIEKVLRDIERTIKKVREDR

SEQ ID NO: 19952 - protein, 59 aa, Artificial Sequence
  Synthetic
KEMVDRLRELLERHEKTIRDLVRTLEELLERHRKNIEDLVRELRELLDRAREELKRTAD

SEQ ID NO: 19953 - protein, 57 aa, Artificial Sequence
  Synthetic
SDIEEALKKIKKMTRELREEIKKTEEESERRAKELEKEVRDYLRKVEEEAKRLKDTK

SEQ ID NO: 19954 - protein, 62 aa, Artificial Sequence
  Synthetic
EDIRRVLEELKKVLEENNRVIEELARRLDELNKKLRELLERIKKTLDDLNKRLEKLIRDTEK

SEQ ID NO: 19955 - protein, 57 aa, Artificial Sequence
  Synthetic
SKIEKMLRDIEKKTKELEDEIREALKRLREIAEKLKDEVEKYIRELRELLKRLAETK

SEQ ID NO: 19956 - protein, 62 aa, Artificial Sequence
  Synthetic
EKIREALERLRKILRENNEVIRELVERLRKVLEDLKRTVKTIEDRLRKVNEDLKRLIEELER

SEQ ID NO: 19957 - protein, 57 aa, Artificial Sequence
  Synthetic
SEAEKLIEDIKKLIEDHKKRTKELIDEIEEDIKKHREDVERLLRDIERLIEELEREN

SEQ ID NO: 19958 - protein, 59 aa, Artificial Sequence
  Synthetic
EEVERKVREAVKDVRRVLDESRRRLDTAIRKVEEDLRKSREDLERAVKKLRDVLEELKR

SEQ ID NO: 19959 - protein, 60 aa, Artificial Sequence
  Synthetic
SEVEKLERKTEKILKDLKDEVKRAEEETRRILEELKKMLEDMEKRTREILKRIRDLARDG

SEQ ID NO: 19960 - protein, 56 aa, Artificial Sequence
  Synthetic
EKKLRELNTELTRLIDEIRKRLEELNERLRKLVEEIEERLRRLNEELKRLVEEIRR

SEQ ID NO: 19961 - protein, 57 aa, Artificial Sequence
  Synthetic
KELEDTAEESKRELEKIRDEVRKEEEESEKLLRKIEKELREYAEKTRRILEKLRRDQ

SEQ ID NO: 19962 - protein, 59 aa, Artificial Sequence
  Synthetic
EEVARLLKKLNDELRRLIREIEERLRKLNDDLRELIERVEERLRRLNEELEKVIRELET

SEQ ID NO: 19963 - protein, 57 aa, Artificial Sequence
  Synthetic
DEVEDTERRSKKKLEELEEELRRTATESKRTLEELKRRLEDEERRSRDALRRLKEAN

SEQ ID NO: 19964 - protein, 59 aa, Artificial Sequence
  Synthetic
EEVKRRLERLNEEIEKLIRDIERTNRELNKELEDLIKEIEDRNRKLNEDLRRLIDELRK

SEQ ID NO: 19965 - protein, 61 aa, Artificial Sequence
  Synthetic
SELEEIAREVKETSKRHEEHVRRSEEEVKKTLKRLKEHVDKSSEDAERTLEELERRLRRDG

SEQ ID NO: 19966 - protein, 55 aa, Artificial Sequence
  Synthetic
DELRRLKEELKENIERAEESHKELADRLRELIKRIKERHEELLRRLRKLLEEIRK

SEQ ID NO: 19967 - protein, 60 aa, Artificial Sequence
  Synthetic
SAEEDLERLIRALKKVLDDHERLLRELLRRLEEVVRRHKELLKKLNRDLEEVLKDIKEKK

SEQ ID NO: 19968 - protein, 55 aa, Artificial Sequence
  Synthetic
DETDKEVRDTIRRIRKHSREVAEEVRKIIEELRRHSKKMADDSKRTIDELRERAK

SEQ ID NO: 19969 - protein, 60 aa, Artificial Sequence
  Synthetic
KVEEELDRLLKEIEKIIEEHRKKNKKLNDDIRRLIEEHERDLRELLKELEKLIRDLKKDL

SEQ ID NO: 19970 - protein, 59 aa, Artificial Sequence
  Synthetic
DRAVEEVRKRIEEILKRIRDNSKRVEEETRELLERIRRNSERLRRDVERLARELEEKKR

SEQ ID NO: 19971 - protein, 57 aa, Artificial Sequence
  Synthetic
SDEERLEEKLRRVEREVEKKLKRLKEELEEYARRVKEMSDRHREEVERFEEEVRRRG

SEQ ID NO: 19972 - protein, 59 aa, Artificial Sequence
  Synthetic
DTLRKLMEKIKRALEELLKRLEDLVRRIEEELRRLNEELRKNIREAEERLRKLKEDAER

SEQ ID NO: 19973 - protein, 60 aa, Artificial Sequence
  Synthetic
SADEILKEIEDTIRKLIEDNKRTLEEHERRTRKLIRELRELLKRHKTESRRLAEELKKDG

SEQ ID NO: 19974 - protein, 56 aa, Artificial Sequence
  Synthetic
GEEVRKRLEELKKKVERENRRHREHLKKVAKEVKRTLDEIRRHLEEVKERVKRARD

SEQ ID NO: 19975 - protein, 56 aa, Artificial Sequence
  Synthetic
SEEEELKRRVDEVRKRTKEIIEELKRHVDRNERTVREIIKRLEEEVRRVAEKVKRG

SEQ ID NO: 19976 - protein, 56 aa, Artificial Sequence
  Synthetic
SKVVEDVRRTLKRLNDELRKVVKDARELHERLLRDLKRVIDRIRERLKRLLDEAEK

SEQ ID NO: 19977 - protein, 57 aa, Artificial Sequence
  Synthetic
DEVETLAREVKKSNDDDRRKTKKTADDVEKKLEDLKRRDEEVRERVEEDLKRLREKV

SEQ ID NO: 19978 - protein, 59 aa, Artificial Sequence
  Synthetic
KEVLDRVADEIRRLNKETNDVDRDVRRRIDKLVEDVKRVTEEVSKEIKRLAEEVDRRIT

SEQ ID NO: 19979 - protein, 57 aa, Artificial Sequence
  Synthetic
DEVEELKRKVRESNKRDEDETRRTEERVEREVRRLEEEVKDVKRKVERELERIAREI

SEQ ID NO: 19980 - protein, 59 aa, Artificial Sequence
  Synthetic
REVVKEVEDRIRKLNRETNEVDKEVRKRVDDLIRDLERVLREVKEEVDRLVRKVEEDAK

SEQ ID NO: 19981 - protein, 61 aa, Artificial Sequence
  Synthetic
DEVEELVKRAEDILERLKREVDRLIKESEDLNRRIRKHVEDTIKEVRKRLEELRKEVEDRA

SEQ ID NO: 19982 - protein, 60 aa, Artificial Sequence
  Synthetic
AKDLLKEVVERVTRVAKAVKEKLDEVVRESREVIKRVEEKNRRVLEEVERVARELKKAID

SEQ ID NO: 19983 - protein, 61 aa, Artificial Sequence
  Synthetic
DEVEELVRRAEEELKRLRKHVEETVERSKKLNDEIKKHVDRTVKEAKDELRRLREEVKKRG

SEQ ID NO: 19984 - protein, 62 aa, Artificial Sequence
  Synthetic
EEAKKLLEDVARRVRKVAEELKKKNKELLETSDRVIEKVRKKNEDLKRTVDEVARRLEEAIK

SEQ ID NO: 19985 - protein, 60 aa, Artificial Sequence
  Synthetic
SEVDEVVERLRRISEELDRRVKKLVKDARRISKELEEAVRRVVKTAKDANKELRKEVRER

SEQ ID NO: 19986 - protein, 56 aa, Artificial Sequence
  Synthetic
VDTLAEDAKRSARETEEILRRLVKKLEESARDTKRIIDELDKELKDSNEEVRRRLK

SEQ ID NO: 19987 - protein, 57 aa, Artificial Sequence
  Synthetic
DEAEEVVKDVEREVRRLEKENRDLVERSKRLVERLEKESRDLVRKSREDVKRLREKG

SEQ ID NO: 19988 - protein, 56 aa, Artificial Sequence
  Synthetic
EEELRKDVERVVKKDEDITDEVRKENDEVVKKNEDIIDELRKKNEEVLRRVDEEAR

SEQ ID NO: 19989 - protein, 56 aa, Artificial Sequence
  Synthetic
SEVEDVVRKVRELVKRLRDESRRLVEESRRLVEELEKRSRDLVKTAEDIVRELKEA

SEQ ID NO: 19990 - protein, 56 aa, Artificial Sequence
  Synthetic
KDELDKEVKEAVKKNREIIRRLEKRNRDVVEENRKIIEDIEKKVRDVVREVRREAK

SEQ ID NO: 19991 - protein, 60 aa, Artificial Sequence
  Synthetic
SSLEEVAERVKKLVRELEESTKTVEELVRRLVTELRKSTEKVRRDVDKLVKELEEIIRDV

SEQ ID NO: 19992 - protein, 58 aa, Artificial Sequence
  Synthetic
REVKRLVEEVEKLIERLRRESRRLIERVRREARELKEESRRLEEEVRKKIEELARRVK

SEQ ID NO: 19993 - protein, 60 aa, Artificial Sequence
  Synthetic
RDLEEVKKKVDKLVRELEESSKKVRKDVEDLVKELEDTTRDVKRLVEELVTRLKRIIEKV

SEQ ID NO: 19994 - protein, 58 aa, Artificial Sequence
  Synthetic
REVKKIIEDVEREMERLERDSRRIVKEVREEADRLRKESKRLEEDVKRKLKELRERVN

SEQ ID NO: 19995 - protein, 60 aa, Artificial Sequence
  Synthetic
DELERVKEKVDKLVAELEKSTDDVKKKVEDLVRELERSSEKVKKDVDRLVKELEDIIRRV

SEQ ID NO: 19996 - protein, 58 aa, Artificial Sequence
  Synthetic
REVKKVVEDVRREAKRLKERSKKLEDEVRDLLRELEKRSDEITKRVREEMKRLEDEVK

SEQ ID NO: 19997 - protein, 60 aa, Artificial Sequence
  Synthetic
DELEDVKRRVEKLVRELEESSKEVRKRVEDLVRELERTTEEVEKLVRDLVRRLEDIIRRV

SEQ ID NO: 19998 - protein, 58 aa, Artificial Sequence
  Synthetic
EDIKRLEEDVERKLRRLEEESRRIVEEVKKEAERLKERSERLTKEVRELADRLAREVD

SEQ ID NO: 19999 - protein, 60 aa, Artificial Sequence
  Synthetic
RELEEVKRRVERLVRELEESLRRVRKEVEDLVRDLERVSKEVEDTVRELVRRLDEVIRRV

SEQ ID NO: 20000 - protein, 58 aa, Artificial Sequence
  Synthetic
REVKTLVEEVRRLLEELERRSRKLVKEVRDEAERLKREDEEIIREVRELLKELERKVR

SEQ ID NO: 20001 - protein, 55 aa, Artificial Sequence
  Synthetic
DELEEVKRTVEELLERLERVNKDVKRKVKELLDRLREVDDRVKKEVKRLIEEVKN

SEQ ID NO: 20002 - protein, 58 aa, Artificial Sequence
  Synthetic
EEIKKLADRVRRELKRSEDHTKRLAEEVRKDLEESRKHTKELEKEVEEELRRLKKEVR

SEQ ID NO: 20003 - protein, 55 aa, Artificial Sequence
  Synthetic
SELEEAAKAVEKLAREAEKSSEDARRAVERLAREAKRANDEAEKAVRELAERARR

SEQ ID NO: 20004 - protein, 58 aa, Artificial Sequence
  Synthetic
KEAKKLAKEAREIADRLRRESEEIAREAEKIAKELADHTRELAERARRIADKLKKDVK

SEQ ID NO: 20005 - protein, 60 aa, Artificial Sequence
  Synthetic
SAEDLIREVRRRVKELERKLEEILKRSEDLTRRLREEAERILKESRDRVRKLEEDARREA

SEQ ID NO: 20006 - protein, 55 aa, Artificial Sequence
  Synthetic
KEVIKKIRDILRRLSEELEKVLEDSERILRRLEDELRESLKRTEEILRELRRELK

SEQ ID NO: 20007 - protein, 56 aa, Artificial Sequence
  Synthetic
SVDEVLKEIEDALRRLKEEVERVLKENEDELRRLEEEVRRVLKEDEELLEELKRKV

SEQ ID NO: 20008 - protein, 59 aa, Artificial Sequence
  Synthetic
EKKIRDVAKEIRDRLKELEEEIEEVTRRNKKLLDDVEEEIRRVHEKTRRLLETVLRRAT

SEQ ID NO: 20009 - protein, 56 aa, Artificial Sequence
  Synthetic
RLEEVVEEMERLIRDLEKKVEDARERNERLVRESRKKAEELIKELRKLLRELEEEI

SEQ ID NO: 20010 - protein, 56 aa, Artificial Sequence
  Synthetic
VETVLKRVREVIRRVEETIKRLDDRNKESSEDVERRLRELLREVREIIKRVREKTR

SEQ ID NO: 20011 - protein, 56 aa, Artificial Sequence
  Synthetic
RLEDVVRESKKLVEESERRVREAIRRNEELVKDSEREAREVIEELKELLRRLEEEL

SEQ ID NO: 20012 - protein, 56 aa, Artificial Sequence
  Synthetic
VEDLLREVRRVDKEANEKIEELDRRNKKSSDDVKKKIRDLKREVKKVIDEVRERTR

SEQ ID NO: 20013 - protein, 57 aa, Artificial Sequence
  Synthetic
SELEKVLTESRDVVRRATKRLREVHKKTKEVVDRLREKLKRVEDEVRKAVRELEEKV

SEQ ID NO: 20014 - protein, 59 aa, Artificial Sequence
  Synthetic
KRLEDVLKESKKLTDDLRKDAKRVLDEDRRLVEELKKELDEARKRVEDLVREVKDRARR

SEQ ID NO: 20015 - protein, 60 aa, Artificial Sequence
  Synthetic
DEVEEVRKRVEEVIRRNEERIEDVRKKVEDVIRRNEKLVDDVRREVKEVLDKLRELLERR

SEQ ID NO: 20016 - protein, 60 aa, Artificial Sequence
  Synthetic
KETVDEVAERLKKLLEESERRVKRVLDEARKLVKRSEDRSKKVLDELEELLRRVRKEADK

SEQ ID NO: 20017 - protein, 61 aa, Artificial Sequence
  Synthetic
RELEELLEEARRSSEEVKKILKKLKKEVDESSERLERIIEKLLRDAKRVADEVRDILEKKR

SEQ ID NO: 20018 - protein, 60 aa, Artificial Sequence
  Synthetic
EERVKRVIDELRELLRRSREEVKRVVEELKKELERSKREVERVIDELRRLLETVEKEIRD

SEQ ID NO: 20019 - protein, 61 aa, Artificial Sequence
  Synthetic
SELEDLKRRIRKSSEDSKKSLEDSDRTIEESSRDSSRTARESERKLEKVLREVDDILKKVK

SEQ ID NO: 20020 - protein, 60 aa, Artificial Sequence
  Synthetic
EEDVERIVRELEELVRKSREDHKRVIDALREKLKKSREEHRRVIDKLRRELKRVEDEIRR

SEQ ID NO: 20021 - protein, 61 aa, Artificial Sequence
  Synthetic
SILEKLEREVRKSSRESRESAKKSLREIEESSRRVEEELERLLREVRRVAEEVLDILRRKK

SEQ ID NO: 20022 - protein, 60 aa, Artificial Sequence
  Synthetic
REEVKRIIERLRKLLEDSKRDHEEVIKELRKLVEDSRRRVEEVIRRLRELLKRVADELRR

SEQ ID NO: 20023 - protein, 61 aa, Artificial Sequence
  Synthetic
DELEEALRRLKKIVEDLARRNEELLKELRRDSKRLKDEIKRVVDELRDIVRRLKEELDRVK

SEQ ID NO: 20024 - protein, 62 aa, Artificial Sequence
  Synthetic
ERLERRVREIIRRAEELLERSRKRSEEIAREAEKSNRELEDAVRRIIRELEELLEKLERDAR

SEQ ID NO: 20025 - protein, 60 aa, Artificial Sequence
  Synthetic
DEVDKVTRELREIMRKLKEDDKEVLDRLREDSERVERTNREVEKRLEAIIRDLEEKLRRK

SEQ ID NO: 20026 - protein, 62 aa, Artificial Sequence
  Synthetic
ERLKEKVDRIREEAKRLLEELEKHVRDSEREAEDSNRRSRETSEEIIRRLRKKVKELEDKVR

SEQ ID NO: 20027 - protein, 60 aa, Artificial Sequence
  Synthetic
SEVDKVEEELERIVKELKDRDREVLKRLRDDSERLVRELKKVAEELRKIAKDIDERLKEK

SEQ ID NO: 20028 - protein, 62 aa, Artificial Sequence
  Synthetic
ERLKDRVDKIREKARKLLEELKKHVDDSIEEAKRSNEELRKTVEKIIREAEKLLRDLKEAVK

SEQ ID NO: 20029 - protein, 60 aa, Artificial Sequence
  Synthetic
SEAEKVERELDKIIRELKETDKKVLEDNRRVVEKIEREMERVLRELERIMKELKEELDRK

SEQ ID NO: 20030 - protein, 62 aa, Artificial Sequence
  Synthetic
ERLKEKVDEIRKRAEELVKELARHVEKSIRESRELDKRLEEKVKEIIRRARELLEDLRRKAE

SEQ ID NO: 20031 - protein, 57 aa, Artificial Sequence
  Synthetic
SEAEKVRREVEDLIRTLEEVVRKSSEEIKELLRRLREVVERIRDTTRRLIEEIEKKV

SEQ ID NO: 20032 - protein, 59 aa, Artificial Sequence
  Synthetic
REDLERVLKEVREIVKRLLKRLEESLRDVRRIAEELREMLKRSLKRSEEIIRKLLEDVR

SEQ ID NO: 20033 - protein, 57 aa, Artificial Sequence
  Synthetic
DEVDTVDEKVKRLAEELRKRVRESKERTKKLARDLREAVKESLKDSERLAEDLRRKV

SEQ ID NO: 20034 - protein, 59 aa, Artificial Sequence
  Synthetic
REKLERVEREIEKLVREVEKILRDIHRDNERVVREVERRLEEITRRSRELAKRVEDETR

SEQ ID NO: 20035 - protein, 57 aa, Artificial Sequence
  Synthetic
DEVDEVARKVERDAERLEDLNRRSEETSRRLAEELRRLNERSERETERLAEELRREV

SEQ ID NO: 20036 - protein, 59 aa, Artificial Sequence
  Synthetic
KKKLEDILREIEKLIRRVEEISRRILEESKRLADEVRKITKKLHDDNKRLADRVKEETR

SEQ ID NO: 20037 - protein, 57 aa, Artificial Sequence
  Synthetic
REIDEIKERVDRLAEKLRRDMERSTRESRKLVEELKERAKRSKEETTKLAEELRRRV

SEQ ID NO: 20038 - protein, 59 aa, Artificial Sequence
  Synthetic
KEELERILREIKRLMDEVKRILEELLKTNKKLIDEVRKRLEELHKRNRELVEEVARRAN

SEQ ID NO: 20039 - protein, 61 aa, Artificial Sequence
  Synthetic
SEVEAVEKEARELVREDERRDDEIEEDLRRLLEENRRKDDKVEKEVRELLKRLRDKVDDRA

SEQ ID NO: 20040 - protein, 59 aa, Artificial Sequence
  Synthetic
KRDVKRVRDTVRDISRKNNRTTEELLKRVRDISRRNKEITEELLRRIREIAEDLARKLD

SEQ ID NO: 20041 - protein, 61 aa, Artificial Sequence
  Synthetic
SEVEKVEEEVKRLVEENERRVRESSREVEKLLREDAERDERASRELKKLLEKLKRAVDKRA

SEQ ID NO: 20042 - protein, 58 aa, Artificial Sequence
  Synthetic
RAVEKVLRTARKISEDNKRKNDEISERLRRISERNNRESEKLLRDLEKIIEDVERKLE

SEQ ID NO: 20043 - protein, 61 aa, Artificial Sequence
  Synthetic
REVEEVEKKARELVERDERTDERIRKELEDLVRENKKEVKRVRETIERLLRDLKKAVDERG

SEQ ID NO: 20044 - protein, 59 aa, Artificial Sequence
  Synthetic
EEDVKRVEKTVEDISRKNNEITKRLRDTVRRLSEKNRRDLEKALEDLKRIVDDVRRKIT

SEQ ID NO: 20045 - protein, 61 aa, Artificial Sequence
  Synthetic
SEVEEVEKEARELVKRDEDRDKEIEDKLRELVERNRRLVRKSSEELKKEIKRLKDEVDRRA

SEQ ID NO: 20046 - protein, 59 aa, Artificial Sequence
  Synthetic
KEKVEKVLKEVRDISRENNKTTDTLEKEVRRLSEENKRRNEEVTRRVRKILEDVERKAR

SEQ ID NO: 20047 - protein, 61 aa, Artificial Sequence
  Synthetic
KEVEDVEEEVKKLVEENKKAVDDSREEVRKLLEENKKAVDDSRKEVEKLAKKLKEAVDRRA

SEQ ID NO: 20048 - protein, 59 aa, Artificial Sequence
  Synthetic
KEKVKRVLDEAKKISDDNKRKNEEVSKELEKISRDNLKLNEDITREIREIVERVDERLE

SEQ ID NO: 20049 - protein, 61 aa, Artificial Sequence
  Synthetic
SEVEKVEKDLRKLIKDNRDSVRRVKEEAEKLVEENRRSVEEVRRTIKELLERLEKLVRDRG

SEQ ID NO: 20050 - protein, 59 aa, Artificial Sequence
  Synthetic
KRLVDKVRRELEKILRDDNRIIKEVLDTVRRLSEDNLKKVKDVLEELTRIAEEVRERAR

SEQ ID NO: 20051 - protein, 56 aa, Artificial Sequence
  Synthetic
SKVEDLLEKLERELEKNRKRTKELLKRAEESSEDIREKVRELRERLERLIEELERR

SEQ ID NO: 20052 - protein, 59 aa, Artificial Sequence
  Synthetic
DKLLEDLERLVRRVLDEARKINEELDKRVKDSVREVEKRLRELEEEVKRIIEEVEKKAQ

SEQ ID NO: 20053 - protein, 56 aa, Artificial Sequence
  Synthetic
EELERLARIVDEAHKRSRDLLETSKREVEDAIDEIRARLEDSRRLVEEVTDEIRRI

SEQ ID NO: 20054 - protein, 58 aa, Artificial Sequence
  Synthetic
ERLKELKKRLRDLIEENDRRAKESTKKIRDLAKELRERARRTEEEIKTLMKELEDRMK

SEQ ID NO: 20055 - protein, 56 aa, Artificial Sequence
  Synthetic
KELEDLRREVEEIHKTSERLLRESDKLVEEAIRRIEELLERSKDTVTKAADEVRKA

SEQ ID NO: 20056 - protein, 58 aa, Artificial Sequence
  Synthetic
ERLKKLKEDVKRLIEENRKRAEDTKRKIEEEIRRLKEEADRTSEEIKKRADDLRRRAD

SEQ ID NO: 20057 - protein, 60 aa, Artificial Sequence
  Synthetic
DELEEVDKLVKKVHEDSRKLIEDVDRKVREVVERSDRIIETVEELVERVITEVEDMLRKG

SEQ ID NO: 20058 - protein, 58 aa, Artificial Sequence
  Synthetic
DRLRKVEKRIEDLARENEKRNRDLERKIEKLADESRKKNEDLKKRIEDLAKRLKDEAD

SEQ ID NO: 20059 - protein, 60 aa, Artificial Sequence
  Synthetic
SSLETVREEVRRVKEESDRIIKEVRDRVEEVHKTSKRIIEEVEERVERVIREVREMLRRG

SEQ ID NO: 20060 - protein, 58 aa, Artificial Sequence
  Synthetic
ERLDRVVEDIRRLAEESRRKNEELRKEVEELVKRNKELNEKLKKKVKELAKELRDEAK

SEQ ID NO: 20061 - protein, 60 aa, Artificial Sequence
  Synthetic
DDLETVKRLVDEVIRTSEELIDTVRRLVEEVHRESERILKEVKKEVERVIREVEKLRRKG

SEQ ID NO: 20062 - protein, 58 aa, Artificial Sequence
  Synthetic
KDLERVRKRIEDLAKELERRNRELEEDIKRLAKENEELARELKKEIETLAKRLEDEDR

SEQ ID NO: 20063 - protein, 60 aa, Artificial Sequence
  Synthetic
SSLEEVDRRVKEVHKESDKIIREVDKRNKEVNRRSEEIIEEVEKTVEEVAKTVDDMLRRG

SEQ ID NO: 20064 - protein, 58 aa, Artificial Sequence
  Synthetic
RELKRVKEEIDRLVEEDKEKNERSDKRAKETVDKNKKLNDDLEEKIRRLAEELRRRKK

SEQ ID NO: 20065 - protein, 60 aa, Artificial Sequence
  Synthetic
SSLKEVERLAKELHEKSERIIREVEKLSRELHKTSEKIIRDVARRVKKLIDDVREVITRS

SEQ ID NO: 20066 - protein, 58 aa, Artificial Sequence
  Synthetic
EELEKLRKRVEDLVRRNEEENKRTLRESEELVKENRKRNKELRDRVEKLVEELRRELK

SEQ ID NO: 20067 - protein, 60 aa, Artificial Sequence
  Synthetic
KKLEDVKELVERLHRESEEIIRDVERRSRELAETVKKILEEVRRLSKKLVDEVREVIKRS

SEQ ID NO: 20068 - protein, 58 aa, Artificial Sequence
  Synthetic
KDVDRVDREVEELVKENRERNKDTKRESERLAEKLRRDVEKSLRDSERLVKELRDRLR

SEQ ID NO: 20069 - protein, 60 aa, Artificial Sequence
  Synthetic
KKLEDVKRLVDKLVTESEDIIRRVTEESRRLVEESRRVIEEVKKLSEELVRRVEKVIREK

SEQ ID NO: 20070 - protein, 58 aa, Artificial Sequence
  Synthetic
ERVKKVKRDVEKLVRDSRELNKRTREESERLVEESERLNEESRKESERLVRELREKLR

SEQ ID NO: 20071 - protein, 60 aa, Artificial Sequence
  Synthetic
SKLEDVERKVRELVRRSKRVIKEVERLVRELHKRSEDVLRKVKKDSRDLAREVKDVIRRK

SEQ ID NO: 20072 - protein, 58 aa, Artificial Sequence
  Synthetic
KDVDKVRRDVEDLVRESRELNKRLKREVEELAKENRRRVEESRRESEELAKELRERLK

SEQ ID NO: 20073 - protein, 60 aa, Artificial Sequence
  Synthetic
SSIEKVLRELEDIVRKIEERNKKSHDEVRRVVEEIKRRVKKSHEDVRRVVEKIDEDIKRK

SEQ ID NO: 20074 - protein, 58 aa, Artificial Sequence
  Synthetic
DEIRRVKERLDELIRRLEELIRRNVTELKRLIDDLRRLVEENVRRLKELIDKLREDVK

SEQ ID NO: 20075 - protein, 60 aa, Artificial Sequence
  Synthetic
SEIERVLEELKKIVRRIKEKLKESHERVREVVERLKRRNEKSHRDVRRVAERIRREIEKK

SEQ ID NO: 20076 - protein, 58 aa, Artificial Sequence
  Synthetic
KDIREVKKEADRLIKELRDLIETNEREMKKLIDELEELIRDNARRLEELIKRLEEEVR

SEQ ID NO: 20077 - protein, 61 aa, Artificial Sequence
  Synthetic
SELEKVLEEAKRVVDEIKKKLEESHKDNRRTVEEIKRRNKESHERLKEAVDKLKAEIEKKR

SEQ ID NO: 20078 - protein, 58 aa, Artificial Sequence
  Synthetic
DRIREIAEELDKLIRELEKLVKRNADESDKLLDELRKLVEDNEREAERLIKELEDEAR

SEQ ID NO: 20079 - protein, 61 aa, Artificial Sequence
  Synthetic
SEIERVLRELEKIVEELKRENEDVHRRVREVVKKLKDENRKSHEEVKRMVDKIREEIKRIR

SEQ ID NO: 20080 - protein, 58 aa, Artificial Sequence
  Synthetic
DDIRRAAEKVDKLIKELEDLIRRNAEELRKLIEELEELIRRNRERLKRLIEDLKRAVE

SEQ ID NO: 20081 - protein, 57 aa, Artificial Sequence
  Synthetic
SEMERVEEEIRRLLKELDKKARDVHEADKELVKENRKLADEVERDLRRLLEELRRDV

SEQ ID NO: 20082 - protein, 59 aa, Artificial Sequence
  Synthetic
KKAIEDVLRKIKKLVEDLKRRIEEVLRESEALNEDTKRLIEEVLRDVRRTIDRLKKEAK

SEQ ID NO: 20083 - protein, 57 aa, Artificial Sequence
  Synthetic
SDMDRVEKELEELLRENEELAKDIHRRDKELLEENRELVRRAEEELRRLLEELARDV

SEQ ID NO: 20084 - protein, 59 aa, Artificial Sequence
  Synthetic
KEVIKDVLRKVRKINKETKELLRTVLEKSEKLNRDTKKRIKDVLEKIKRLIDELRERAR

SEQ ID NO: 20085 - protein, 57 aa, Artificial Sequence
  Synthetic
KEREDIEDRVRKLIEELEESVRRSNETVKKLLRELEKLLEDSNRSVEELARDLRRKV

SEQ ID NO: 20086 - protein, 55 aa, Artificial Sequence
  Synthetic
EKVLRKVEKVVEDLKRHNRKVNEEIKRVAEKLKRELEEVNKDIRRMARKLEEEVR

SEQ ID NO: 20087 - protein, 57 aa, Artificial Sequence
  Synthetic
SEAEKIAEDVERLARDLERLLKESNDTVRTLIEDLRRSVEETAKEVRDLIEDLRRRV

SEQ ID NO: 20088 - protein, 55 aa, Artificial Sequence
  Synthetic
EEVLKELKKVADELRRILEDVNRRIRKVVDDAREHNKKVVEDVRRVAKEARDRVR

SEQ ID NO: 20089 - protein, 59 aa, Artificial Sequence
  Synthetic
DEVEELERRIEKLAREVKKEIKDALRRNKRLIDEVKKIIEDVNRENRRLMEEVKRLIDA

SEQ ID NO: 20090 - protein, 58 aa, Artificial Sequence
  Synthetic
DELRRIAKRVEDLAEELKRLLDKSRETSERLVDELRKLLRESNETSKELVKRLDDRRK

SEQ ID NO: 20091 - protein, 59 aa, Artificial Sequence
  Synthetic
SEAEKLLKEAKRLADEAKKIIKRAHEENKRAADEAKKIIEEANRENEKLAREAKKLIDA

SEQ ID NO: 20092 - protein, 58 aa, Artificial Sequence
  Synthetic
DEAREIEKRVRELAEELKKLARESNEASKELAKELKELAERSNKTSEDLAKELEDRAR

SEQ ID NO: 20093 - protein, 59 aa, Artificial Sequence
  Synthetic
SEVERLLEEIKELAKRVKDIIKEVNKENKRLVDEVKDRIRKINEDNNRLVETVKELIRK

SEQ ID NO: 20094 - protein, 58 aa, Artificial Sequence
  Synthetic
KELERIEREVERLADELRKLLEESNESTERLAEELERLVRESERDSRRLAEELKRRLD

SEQ ID NO: 20095 - protein, 60 aa, Artificial Sequence
  Synthetic
SELEKLKEEIKKLADDVKRIIKKVLDENRKLVDDVKKIIKKVTEENRKLVREVAELIKAG

SEQ ID NO: 20096 - protein, 58 aa, Artificial Sequence
  Synthetic
KELEEIDKDVDRLIEELKRLLEDSNRDTERLAKELKDLLDESNKDSRRLAEELKRRTD

SEQ ID NO: 20097 - protein, 59 aa, Artificial Sequence
  Synthetic
REVDELRKEIRRLAKEVKDIIKKATERNEELVRRVKEIIKEVNRRNRKAAEEVKELIRA

SEQ ID NO: 20098 - protein, 58 aa, Artificial Sequence
  Synthetic
EDLERIRKEVEELARELEKLLEESNRETKRLARELEKLLEDSRRSTEELAKELEEAER

SEQ ID NO: 20099 - protein, 57 aa, Artificial Sequence
  Synthetic
REAEEVDKEIKKIVRDVRERIRKLNEDNRRIAEKVKREIEELNKRNRDTAKEIEKRG

SEQ ID NO: 20100 - protein, 58 aa, Artificial Sequence
  Synthetic
DELREIERDVDRLVEELRKLVEDSRRTTKRLVEELDELVETSDRETEKLVRKLRERER

SEQ ID NO: 20101 - protein, 57 aa, Artificial Sequence
  Synthetic
SDLERVLREIKKEVDDVKRLIRELNERNRTIVEEVKKLIEKLNRDNERIVREVKKRG

SEQ ID NO: 20102 - protein, 58 aa, Artificial Sequence
  Synthetic
EEVKRIEDEVRKLVRELEELLKRSDDDTERLVEELKELLKRSEKKTRELAKELRDRRR

SEQ ID NO: 20103 - protein, 57 aa, Artificial Sequence
  Synthetic
SEVDEVLKRIKEEVDRVKEEIKRLNKENNDIVRKVKKEDRDIVETIRKIAEDVKRRG

SEQ ID NO: 20104 - protein, 58 aa, Artificial Sequence
  Synthetic
DELREIDERVEKLVKELEETLRESEKDTKRLVEELEKSLKETEDDVRRLVKELKDRDD

SEQ ID NO: 20105 - protein, 57 aa, Artificial Sequence
  Synthetic
SKLEEVLRDIRRIVEEVKDEDRRIVEEIRKIAKDVKEKIKELNRENNRIVREVKERG

SEQ ID NO: 20106 - protein, 58 aa, Artificial Sequence
  Synthetic
DELRRIDEEVEKLVKELEKSVEDTKREVDRLAKELEDLVRDSKRDTDRLVKELKDRTD

SEQ ID NO: 20107 - protein, 57 aa, Artificial Sequence
  Synthetic
REVEEAADDLRRLIEENERSVRESKRTLEELIKENEDSVRRSEKSLRDLIRELEEEG

SEQ ID NO: 20108 - protein, 56 aa, Artificial Sequence
  Synthetic
VEELLKRVRDVSEESKRLDRKLNEDVKEVSKDSKRRDRELNERVRKVAEDVKETER

SEQ ID NO: 20109 - protein, 57 aa, Artificial Sequence
  Synthetic
SEVEEAAERAKRLIDKLKESADRSEKTARDLIRDLNRSTEEIAREARKLIEELKKAG

SEQ ID NO: 20110 - protein, 56 aa, Artificial Sequence
  Synthetic
VKKALEEVRRAAEEAEKADRKLNKEVKEAADRARELNKKLADEVRKAAKEAKEKAD

SEQ ID NO: 20111 - protein, 57 aa, Artificial Sequence
  Synthetic
SEVEEAAKEAKRLIEELNRSTEKIARDAKKLIEELRKSAKESADSARKLIEELKKRG

SEQ ID NO: 20112 - protein, 56 aa, Artificial Sequence
  Synthetic
VKKALEDVKRAADKAKEDNKKLLKEVEDAAREAKRADRELNKRVKEAADKAKEEAN

SEQ ID NO: 20113 - protein, 61 aa, Artificial Sequence
  Synthetic
DELEEVRERIERLIRRSEELNKKVEKENKELVDRSREINRRVLDEIRRLIREVERILEEEG

SEQ ID NO: 20114 - protein, 59 aa, Artificial Sequence
  Synthetic
EEEVRKLEEEVRELIKKLERSNRELNKETEKLVEDLKRSNKELEEDVERLARKLEEELR

SEQ ID NO: 20115 - protein, 61 aa, Artificial Sequence
  Synthetic
KELEEVEKRIEELARRVEERIKKVIEDNRRLVEESEKINEEVRREVKRLIDEVKEIIRRKG

SEQ ID NO: 20116 - protein, 59 aa, Artificial Sequence
  Synthetic
EREVRRLEERVEELARRLEELLKESNTRSEKLARDLEKSNEDLEREVEELAKRLEEELK

SEQ ID NO: 20117 - protein, 61 aa, Artificial Sequence
  Synthetic
DSVREVAERIDRLVKESERINREVIETNRRLFKESEKINDKVRKEIEDLIRRVKEIIDRDG

SEQ ID NO: 20118 - protein, 59 aa, Artificial Sequence
  Synthetic
EEDLRRLKKKVDDLARKLEESNRRSNEDSKRLARELEESNKDLKRRVDELARELEERLK

SEQ ID NO: 20119 - protein, 61 aa, Artificial Sequence
  Synthetic
DELKEVEERIERLIRESKRVNEEVKETNRRLVRESKEINKRVHDTVRRLVEEVRRIIDERG

SEQ ID NO: 20120 - protein, 59 aa, Artificial Sequence
  Synthetic
EKEVRRLREEVEKLAKELKRSNDESNKESERLVEDLKRSNTENSKAVEDLARELKERLK

SEQ ID NO: 20121 - protein, 60 aa, Artificial Sequence
  Synthetic
RSVEELKKKVEDLVRKLEELVKDSKRESKELVDDSERLVKELEDDVRRLVRELRERVRRR

SEQ ID NO: 20122 - protein, 59 aa, Artificial Sequence
  Synthetic
ERIIKRIEEEIEELIRRVEEIIRKVIKENRELVERDREIIKTVLERIRELIKEVTDRIE

SEQ ID NO: 20123 - protein, 60 aa, Artificial Sequence
  Synthetic
SEVEKLEEEVERLVRDSERLNKRLEDRVKKLVEDSERLVRELEKTVRDLVKKLKDDVRRR

SEQ ID NO: 20124 - protein, 59 aa, Artificial Sequence
  Synthetic
ERIIRRIRKEIKDLFDDDKRISEEVERRIERLFKEDKKIIEDVEREIRRLIKEVEDRIR

SEQ ID NO: 20125 - protein, 60 aa, Artificial Sequence
  Synthetic
DDVERLERRVRELIKESEKLVDDLRKDVERLVKKSRDLNERLREDVERLVKELEDRVRKR

SEQ ID NO: 20126 - protein, 59 aa, Artificial Sequence
  Synthetic
KEIIDKVRKEIEDLVRKDKEIIDEIRKEIRRLVEEDEEISRRVEETIRRLIREVAERIR

SEQ ID NO: 20127 - protein, 57 aa, Artificial Sequence
  Synthetic
SEVDELRKRVEELVRRSRKLVEEHRRKVRELVEESRRLVEELRRDVERLVKKLRDEL

SEQ ID NO: 20128 - protein, 60 aa, Artificial Sequence
  Synthetic
ARDLIEEVRERADRVAKKDEDVIRKSEEDTERVVREDKKIIDRVRKDVEEVIRRVEEETR

SEQ ID NO: 20129 - protein, 61 aa, Artificial Sequence
  Synthetic
STLERLTEDVKRVIREVEEVIKKLKEEVDKSLEDVRRKIEESRKETKRVIDEVKRRIKDKR

SEQ ID NO: 20130 - protein, 56 aa, Artificial Sequence
  Synthetic
VEELAKRLEELIRRLEELVDRLRKELKESIEEIRKRVRDHKEESKRLIRELDEEVK

SEQ ID NO: 20131 - protein, 61 aa, Artificial Sequence
  Synthetic
STLERLDEDVKRVAREDTELIKESEERTKKSADDVRKKIEDSRRTTDKVVTDVEDIIEKKR

SEQ ID NO: 20132 - protein, 56 aa, Artificial Sequence
  Synthetic
VEELAEKLKELLKDSERRVDEHRRKSEESTREIEELVKRHEDRSRELIKRLDEEVR

SEQ ID NO: 20133 - protein, 60 aa, Artificial Sequence
  Synthetic
SLLEKLRRRVDEVIKRDDELIEESKRRTDEALKRVEERIRKSLEETKEAVDRVRDIIRRV

SEQ ID NO: 20134 - protein, 56 aa, Artificial Sequence
  Synthetic
VDELRERLRKLLEDSEEKVKRHKDESDKLIKDIEDKVKRHEDESRRLIRELREELK

SEQ ID NO: 20135 - protein, 56 aa, Artificial Sequence
  Synthetic
SEADELRKKLEETNKDIKRRVEELKRRLEESNERIEELVRRNEKKSKDLLDDVRRR

SEQ ID NO: 20136 - protein, 59 aa, Artificial Sequence
  Synthetic
EEVLKRLDKKLEDSRRDVERVEKEVEELLRESEERVKRVVETVDKTDEEVKKDVDDKRR

SEQ ID NO: 20137 - protein, 56 aa, Artificial Sequence
  Synthetic
SEAEDLEKKAEDTNREIKKIAEELKKHAEDTNREIEKKVEDLRREAERILREVARK

SEQ ID NO: 20138 - protein, 59 aa, Artificial Sequence
  Synthetic
EEVLERLERKLRESKREVDRLAEKIKKLNDDSRKRVDEVVERVRRLLEDVKRKVDEARR

SEQ ID NO: 20139 - protein, 58 aa, Artificial Sequence
  Synthetic
DEVERLEEDVERSIRDSEKVVRDSERRVRESNEEIRRLIEESDKDVKRLIDEATKKSG

SEQ ID NO: 20140 - protein, 59 aa, Artificial Sequence
  Synthetic
REVIRELKERLKEISDRLKKRSEKSVRDLDDISRKIVRRSEDTVRKLREIARRLDERTK

SEQ ID NO: 20141 - protein, 58 aa, Artificial Sequence
  Synthetic
REKDELEEAVRRSNKRLKDILEKSRKDVEESIKRSEELLKRSDDEARKLIEEMTRKSG

SEQ ID NO: 20142 - protein, 59 aa, Artificial Sequence
  Synthetic
RKVIEDVLRELKKITDEIEKESRRSLDELRRISKELEDDSRRTLEELKKIVKELKDRET

SEQ ID NO: 20143 - protein, 58 aa, Artificial Sequence
  Synthetic
DEDRRLEEEVRKSIEESERVIERSEEEVRRLIEEARTLLEDSRRKVEDLLREMTRRAG

SEQ ID NO: 20144 - protein, 59 aa, Artificial Sequence
  Synthetic
REVIEKVLRELREISERLKRESERSLRELEEIARDLLRRSRRTVEELRRIAEELVKRAK

SEQ ID NO: 20145 - protein, 60 aa, Artificial Sequence
  Synthetic
DELEEVLERIEREIRRVSERSEELSRRNEKIIREVEEESRRILEEIKREIDEVKKRAERV

SEQ ID NO: 20146 - protein, 62 aa, Artificial Sequence
  Synthetic
EEAKKLVREVEETVRKLVEELREMNKRHEDKNRELSDRLREIDKRLEDEVRKLVEELRKKVE

SEQ ID NO: 20147 - protein, 60 aa, Artificial Sequence
  Synthetic
DELEEVEKEMERIIREVERKLREVNERIKEIIERVIRESKEILDELKRIIDEVKKRAERV

SEQ ID NO: 20148 - protein, 62 aa, Artificial Sequence
  Synthetic
EDAERLVRELRKKVEELKRRLEELNRDDKRTIDELVKTLDKIDRELRKTVEDLVRDLERDVK

SEQ ID NO: 20149 - protein, 57 aa, Artificial Sequence
  Synthetic
SKVDEVLKDVRRISEESERRIRELNDRSRKISKESEDRIRELLRRLEEIVERLKRTN

SEQ ID NO: 20150 - protein, 56 aa, Artificial Sequence
  Synthetic
AEELRKEVERLIRENEELVERHRKTVEELRRRNEELVKRLEDTVRKLEKELKEEAD

SEQ ID NO: 20151 - protein, 57 aa, Artificial Sequence
  Synthetic
SELDRAADRLRKISKRSEEEIRKLNEEVKKISKESEEKIRRLNEEVKRIVEEVKRRN

SEQ ID NO: 20152 - protein, 56 aa, Artificial Sequence
  Synthetic
AKELAEIVEKLIRDNRRLVEEHEESVRRLEDRNRKLVEDHERTVRKLIKELRETRR

SEQ ID NO: 20153 - protein, 57 aa, Artificial Sequence
  Synthetic
SELEKLLRDLEEIARKVEEEIRTLNEDVKRISKESKERIDRLKEELKKIVDDLKKRR

SEQ ID NO: 20154 - protein, 56 aa, Artificial Sequence
  Synthetic
AEDLRREVERLIRELRKLVREHERSVRKLIEENRRIVRELEELVKKLRKELEDTLR

SEQ ID NO: 20155 - protein, 57 aa, Artificial Sequence
  Synthetic
SELEEAERRLREIVRKVEEDSRKLNEELKREVDEVRRRSEELNKRVRDEAERVRKEN

SEQ ID NO: 20156 - protein, 58 aa, Artificial Sequence
  Synthetic
EKAEDLARIVKKLVEDLKRLNKRHKESVDELVRRLEELDREHERTIRRMIEELRETER

SEQ ID NO: 20157 - protein, 60 aa, Artificial Sequence
  Synthetic
KEVEKLLEDLKEVARRVSEEIKRLLKELKEVSKRSEDRIRTSLERVKKVVEDVLREADEF

SEQ ID NO: 20158 - protein, 55 aa, Artificial Sequence
  Synthetic
RELKEEIEKLLRRLRKLVKELKEEIKKIVDRNRKLVREHEARSEELKEEIRREVE

SEQ ID NO: 20159 - protein, 60 aa, Artificial Sequence
  Synthetic
SEKEELLKRVAEVSKKSKDRARELNERLKKVVDEVLETIRKLNEDLKRVVERVKEKIKDK

SEQ ID NO: 20160 - protein, 55 aa, Artificial Sequence
  Synthetic
KELRKEAKRNVDENREVVKENKRTTEKLLRDLDRILKENKRTVEKLVRELREEVR

SEQ ID NO: 20161 - protein, 60 aa, Artificial Sequence
  Synthetic
DEKERLLEDVKRASEDSERRIRELNDRVRRVSEESERRIRKLNKELRDEVEKVLREIDRI

SEQ ID NO: 20162 - protein, 55 aa, Artificial Sequence
  Synthetic
DELREEIEKNLRRNEELVKKNKKDSEDNKRDNDRLVKENEKTTEDLLRRAKEEVD

SEQ ID NO: 20163 - protein, 60 aa, Artificial Sequence
  Synthetic
DETETVEKKLRDVLERVKKDSEDSREELKRVHKRSEELSRRSNKELDDVLDEVRRIIERS

SEQ ID NO: 20164 - protein, 55 aa, Artificial Sequence
  Synthetic
EELKKRLDEMRKTIEKLLEDTKEELRELIERNKKLLDDTARRAEEIIKEIEDRSK

SEQ ID NO: 20165 - protein, 60 aa, Artificial Sequence
  Synthetic
SREEKVLEDLDRVLKRVTDLSKESLDEVERVHEESERLIRDSNRVLRDVLEKVREIITKS

SEQ ID NO: 20166 - protein, 55 aa, Artificial Sequence
  Synthetic
KELKDRAREVIRRIEKLVEDTERALRDLIRKNEELLKRTEEELKRAEEDIRRKSK

SEQ ID NO: 20167 - protein, 61 aa, Artificial Sequence
  Synthetic
SDAERVLREIERLLEELKELVERVVRKSEELLRRAKRVNEEVNREIKKLADELEEVIRRKG

SEQ ID NO: 20168 - protein, 59 aa, Artificial Sequence
  Synthetic
KEVVDTLRRVVEEITRELEELLERLRRVSEEIRRTLEELLERTRRLVEEIERKLREALK

SEQ ID NO: 20169 - protein, 61 aa, Artificial Sequence
  Synthetic
SELDDVRRKIKRLIDELKRVNEKVNKDSEDLVREVERVNRDVNRRVKELLEELKRVIDERG

SEQ ID NO: 20170 - protein, 59 aa, Artificial Sequence
  Synthetic
EEMVERLRREVEKLERELRELLRRTEENSRRAKERLEDLLRRTRELVKRIEERLREELR

SEQ ID NO: 20171 - protein, 60 aa, Artificial Sequence
  Synthetic
SDVERLKKRVDELAERLKRLDEELKKEVDRIETELRELLKRHEDRNRDISRRLAELLKDA

SEQ ID NO: 20172 - protein, 59 aa, Artificial Sequence
  Synthetic
KEIVERILEELDRLMEKVERVSREILKTIEKLARDIKKRIEEVTRESERLAREVEEALR

SEQ ID NO: 20173 - protein, 60 aa, Artificial Sequence
  Synthetic
DEVETLEKRVRELERRLEELNKELREEVRKIVERAKELDKRHKDDNERIEKELRELLRDV

SEQ ID NO: 20174 - protein, 59 aa, Artificial Sequence
  Synthetic
DEIAKRILDEIDRLMEEAEKVTRDILRKVEELLRRVEDASRRVTKKSRELLKKVKEDLR

SEQ ID NO: 20175 - protein, 60 aa, Artificial Sequence
  Synthetic
SEVETLEKAVRDIVERLKDLNRRLEKEVRDAVKRLRDLLREHEKRNREIAKDLTDKLRKA

SEQ ID NO: 20176 - protein, 59 aa, Artificial Sequence
  Synthetic
KEAATDILRKAEELADEVRRATEEIAKEIRRLVKEVEEVIKDVTRKSDELLKRVADAAK

SEQ ID NO: 20177 - protein, 60 aa, Artificial Sequence
  Synthetic
DELETLADVVRKLIERSRDLLRRHEKRNDEIKKRLDELDRELKERAEEIKKRLEELLRRR

SEQ ID NO: 20178 - protein, 60 aa, Artificial Sequence
  Synthetic
AEDVVRDVLRKAEKVVEEDERLIRRVTEESDRVLDRVEKETKKIVDEAKRMLREVEERIR

SEQ ID NO: 20179 - protein, 60 aa, Artificial Sequence
  Synthetic
SLIDELRERVKEIKKRSEELLKRHEDENRRIVKRSRELLKKLRDVVRDIIRELRKELEDD

SEQ ID NO: 20180 - protein, 60 aa, Artificial Sequence
  Synthetic
AEEVVRRVLKEAEDLLRKDEKILRDVTRRSEKALREDEELAKRVLDEMRKVLEDVKRKSK

SEQ ID NO: 20181 - protein, 60 aa, Artificial Sequence
  Synthetic
EELERLAESVRRIKERLKKLDREHEERNKRIVETSRKLLEELEREVRKIEEDLKRLLDER

SEQ ID NO: 20182 - protein, 60 aa, Artificial Sequence
  Synthetic
AEEVVRDILRRLEELMRRAEEVTKKLTDDSRRLLKEDEDLVREIEERLRRLLKEVKERVD

SEQ ID NO: 20183 - protein, 60 aa, Artificial Sequence
  Synthetic
DEDRDVKREVKKVHEDSARTVEKLDREVEKVHEESERTVRKSEKEAKEVLDRVKDIVKKK

SEQ ID NO: 20184 - protein, 55 aa, Artificial Sequence
  Synthetic
EELKEDLKRILKENEDLVRELEKKLDDIMRENEELVREHEEKSKRIVRELEEEVR

SEQ ID NO: 20185 - protein, 60 aa, Artificial Sequence
  Synthetic
EEKERADRKLEEVHKESKKTVEDSDEALERVHRESKRTVEESRKTLEDVVREVKRIVEEK

SEQ ID NO: 20186 - protein, 55 aa, Artificial Sequence
  Synthetic
KELRRKVEEILKRNEEEVRKHKEKSKKIVEDNRRLVKRHKEESEEVVRDAAREVK

SEQ ID NO: 20187 - protein, 61 aa, Artificial Sequence
  Synthetic
DEDREALKEVEDVHRRSEEKVRESRRRAEEVHKESKKIVDELRRRSEESLKRVEDEVRKKR

SEQ ID NO: 20188 - protein, 55 aa, Artificial Sequence
  Synthetic
EELKDELRKIVETNRELVRRHHETVKKIMEENERLVRELEKRLEEADRKLEEEVR

SEQ ID NO: 20189 - protein, 61 aa, Artificial Sequence
  Synthetic
SLEEEVRRIVDDIRRTNKELLDRSARRAEEIERRLEELLRRSRERADRIREEMRRMLEKAG

SEQ ID NO: 20190 - protein, 59 aa, Artificial Sequence
  Synthetic
KKTVDDVLKRLKEENDRSREEIKRSNEESDRVLDEVRKRSEDSNRRLDKIVDEAKKELK

SEQ ID NO: 20191 - protein, 57 aa, Artificial Sequence
  Synthetic
DELEEVLERLREIAERVIKESKEINDELKRSSERSKRESDKVNKRMREIMKELKDRG

SEQ ID NO: 20192 - protein, 59 aa, Artificial Sequence
  Synthetic
EEDVRRIRKLVEDIARRLKEIIERNRESVRKSREENKKSIEENRRSVKKIADEAREDAR

SEQ ID NO: 20193 - protein, 57 aa, Artificial Sequence
  Synthetic
EETERLIEAVKRIAEEVRKTIERLMERVEKTTRESEELNRRLNRELDREVEEVERAN

SEQ ID NO: 20194 - protein, 55 aa, Artificial Sequence
  Synthetic
EELEKVVREVAERLDRLLKALRDLVEESARRNKRLIEETDRRIKEIAERLKRTSD

SEQ ID NO: 20195 - protein, 60 aa, Artificial Sequence
  Synthetic
SEAERLLEELERSTRESAKRIRDLADKLRRSSEESVKDIERLTKELEEAVRRVLDKIRKK

SEQ ID NO: 20196 - protein, 59 aa, Artificial Sequence
  Synthetic
EEVVRRLAKVVEESRRTNEKLLRDLEKLVEDSKRRNDELLEKNARRIKEVEDELKRETK

SEQ ID NO: 20197 - protein, 60 aa, Artificial Sequence
  Synthetic
KDAEDLLRRLRESTKRSEDLVRKLLEELERSSRESEKLIRELTDRLDKVVKDVERRIREK

SEQ ID NO: 20198 - protein, 59 aa, Artificial Sequence
  Synthetic
EEVVKRLEKAVKESEDRNKELLDRLRKRVEDSKRRNDKLLKENRKRIEEIKRRLDELLR

SEQ ID NO: 20199 - protein, 60 aa, Artificial Sequence
  Synthetic
SKAEKLLRDLEKSTEDSERRIRELLERLRESSRTSEELAKRLEEEVERATREVADKIRKK

SEQ ID NO: 20200 - protein, 59 aa, Artificial Sequence
  Synthetic
KEVVDRLREIVERSREKNRKLLEDLRRAVEESKKRNEEVLRKLKKKVEEIEEELKERLR

SEQ ID NO: 20201 - protein, 60 aa, Artificial Sequence
  Synthetic
SEIEELLKTLKRSTEKSEEDARRLLEELTRSSEESVKRLRDLTERLKEVAKEVIERIRRR

SEQ ID NO: 20202 - protein, 59 aa, Artificial Sequence
  Synthetic
KKVVDRLKRMVDESRKRNEELLKRLEKRVRESRKRNDELLEENKRVIDKIREELERLRK

SEQ ID NO: 20203 - protein, 60 aa, Artificial Sequence
  Synthetic
SLLEEIEELVRRAIDTVRRSSEELKRLVDRVNETNKRSTEELRELAERVDRRLDKLLKEI

SEQ ID NO: 20204 - protein, 59 aa, Artificial Sequence
  Synthetic
RELVEKLKRELRRILEEVRRLNEELMKEIRDTNRKSEKLNRDLKEEIKKILEDVEREVR

SEQ ID NO: 20205 - protein, 60 aa, Artificial Sequence
  Synthetic
DEAEKLKERLKRVLRRVREINRKLLDELRKSNEKVRRINKRLKEELKRVLDEVEKRVRED

SEQ ID NO: 20206 - protein, 59 aa, Artificial Sequence
  Synthetic
EKLVREIEEMVRRLKEEAEKLSEEIRKIVRESRETLKKLSDEVRRLVERAEEKARKDTK

SEQ ID NO: 20207 - protein, 61 aa, Artificial Sequence
  Synthetic
KEDDDLRREIERLLRELEKMNRKVLEDARRLLEELRRVNKEVAERIKDLERRLKDVVEKKG

SEQ ID NO: 20208 - protein, 55 aa, Artificial Sequence
  Synthetic
ERVKEEVDEIRDRLRKSNETLREIVRRIEEDLRKSDRELEELVERIEKRLRELVR

SEQ ID NO: 20209 - protein, 60 aa, Artificial Sequence
  Synthetic
KLVEEVKRLIEESARKNEELIKEVEKEIRRSRKRDKELIEEIERLIREVKKRLEELLTEK

SEQ ID NO: 20210 - protein, 62 aa, Artificial Sequence
  Synthetic
EEAEELVRRVKEEIKRSTTESEKLVKEVKDRARKSHEDSERLAREVLKEIRRLLEEVEKDVR

SEQ ID NO: 20211 - protein, 60 aa, Artificial Sequence
  Synthetic
KEVEDVKELIKKVNEEIKKIHERSNEEIKRVNEELRKIIKKVKDDLRRVLEEIERLSREG

SEQ ID NO: 20212 - protein, 59 aa, Artificial Sequence
  Synthetic
EDLLREAEKLVEDSRRSSEELVRRDKKLVKESRETSERLVRDLERLLREIEKRVREEAT

SEQ ID NO: 20213 - protein, 60 aa, Artificial Sequence
  Synthetic
SEVETVAELIKDVNRRIREEVEEVKRRIEELNDRNRKIAEEVKERIRRVEDEIREARKRG

SEQ ID NO: 20214 - protein, 59 aa, Artificial Sequence
  Synthetic
DELLTRIDRLVKDSERSSRKLVRELEELVRRSEEETEKLVRELERLVTEVARKVDEEAT

SEQ ID NO: 20215 - protein, 60 aa, Artificial Sequence
  Synthetic
KDVEEALETLKRILDRVAKDNEDLIRELRDINRKITKENEDLIRDLERILREVEEEVKRR

SEQ ID NO: 20216 - protein, 59 aa, Artificial Sequence
  Synthetic
DELRRRLEALVEDVRRTLKELIEKTEKVVKEVEDNLRRLLKRTEEVVREVEKKLEEDRR

SEQ ID NO: 20217 - protein, 60 aa, Artificial Sequence
  Synthetic
SEVEKVLEDLKRILEEIARRNEELNERLERINEEITRRNEKSNEETKRVLDKLADDVRKR

SEQ ID NO: 20218 - protein, 59 aa, Artificial Sequence
  Synthetic
EELERTLEKLVDEVRKRLKELLDRSRELVKRVRENLERLEEDTRRLVERVRRELEKLRK

SEQ ID NO: 20219 - protein, 60 aa, Artificial Sequence
  Synthetic
DEAEKVKRDIEEILKRVAEELKRVLEEIRRSSEEVERRNKEVLETLKRILEEVKERLKRI

SEQ ID NO: 20220 - protein, 58 aa, Artificial Sequence
  Synthetic
ELVRELRELVRRIEEELRKLTEEARKLLEDNRRRLEELDRELKELVDRIREELERARK

SEQ ID NO: 20221 - protein, 60 aa, Artificial Sequence
  Synthetic
DEAEKVLEDIKRSSEEVTRRNEKVARDSRKLSEDVEKKNRDVAERIKEIVDKVRRDLSRI

SEQ ID NO: 20222 - protein, 58 aa, Artificial Sequence
  Synthetic
ELVERARELVETNKKRLEDLDRELEELVKENEERLKRLDERLKELVDDIRRRAEEARK

SEQ ID NO: 20223 - protein, 60 aa, Artificial Sequence
  Synthetic
REAEELLKDLERSSEEVDRRVKESNKESEKVSRDVEKKVKDSNKELREITREVAERAKRT

SEQ ID NO: 20224 - protein, 59 aa, Artificial Sequence
  Synthetic
EKMIKRAAELLKTSEDRLRKLIKESEDSIRENEKKLRELIRESEETLREIRKRLEDLER

SEQ ID NO: 20225 - protein, 60 aa, Artificial Sequence
  Synthetic
KEAEDLMEELKKSSEDVERRVRESNKRSKEVSDRVAEEVKKLLERLKKILEEAARKRDRV

SEQ ID NO: 20226 - protein, 59 aa, Artificial Sequence
  Synthetic
EKVIRTIERLVRTSEKKLRKLLDDSRKSVEENRKRVTDLKKEARDLVEDIKRRLEEERR

SEQ ID NO: 20227 - protein, 61 aa, Artificial Sequence
  Synthetic
REEEKVLKDLDDVLKEVTERVREDLRTNEDVVRRAEEEVTRLHEELKRSNDRAKEEVDRKK

SEQ ID NO: 20228 - protein, 55 aa, Artificial Sequence
  Synthetic
EEVRKLVRELKEMLKRLEEDARRLVETTKKRLEDLKRTTDKLVKELEKTLEELRR

SEQ ID NO: 20229 - protein, 60 aa, Artificial Sequence
  Synthetic
SDRERVAKKLRDVLKEVDEEAKKDHDTNKTVVKKVREDIERILRRLKEVLRKVKEEAERK

SEQ ID NO: 20230 - protein, 55 aa, Artificial Sequence
  Synthetic
EELRKLVKELRDRLRELEESSRKLVEDTRRDLERLREEIDRLVEELERRLEELRR

SEQ ID NO: 20231 - protein, 61 aa, Artificial Sequence
  Synthetic
SDAETVLREIRKLNKEVNDASRETLERIEELNRRVERIVREVLKDIERLAREVEEVVRREG

SEQ ID NO: 20232 - protein, 59 aa, Artificial Sequence
  Synthetic
EELIRRLEEIVKESEDNSKENVDRNDRIVRESERSSKELEDELRRIVKKLAREVDELIR

SEQ ID NO: 20233 - protein, 61 aa, Artificial Sequence
  Synthetic
DDVERVLERIKELNRRVEEIVRRVLKTSRDLNKELNDISREVLKRIKDLMREVEEVVRRDG

SEQ ID NO: 20234 - protein, 59 aa, Artificial Sequence
  Synthetic
EELIRELERIVEESKRTSDKLAKELDKLNEDSERNSRKNIEDLRRLVEELARKAEELIK

SEQ ID NO: 20235 - protein, 60 aa, Artificial Sequence
  Synthetic
SLVEELEKLVEENERNMRELDKENRDIVEKNRENVERNERELRKLVERLERRIREVVRTK

SEQ ID NO: 20236 - protein, 60 aa, Artificial Sequence
  Synthetic
LEEIVREVKERIKRSNDEANKENKRTLDEIRDSNRDVNRVSKEVLDEIRRLLKELEDAAK

SEQ ID NO: 20237 - protein, 60 aa, Artificial Sequence
  Synthetic
SLIETLEELVDRNRRNLEKLDEENKDMLRKNEEDVEKNERDLRKLVKELRDEIRKLIEEK

SEQ ID NO: 20238 - protein, 60 aa, Artificial Sequence
  Synthetic
LEDIVREVIKRIEESNRRVNKRNRETLERSKKSNKDVNEASERVLRRIKELLDELRERAK

SEQ ID NO: 20239 - protein, 60 aa, Artificial Sequence
  Synthetic
SLEEELRRLVEELEKRLRELDKRNKDLLRENERNVEKLARDLEELVKKVRRVVEDVVTKK

SEQ ID NO: 20240 - protein, 60 aa, Artificial Sequence
  Synthetic
LEDIVREVLKRVKDLLERAEEENKKTLDDSRKSNEEVNREVEKVIRRIEELVKRLEEAAK

SEQ ID NO: 20241 - protein, 60 aa, Artificial Sequence
  Synthetic
DLVERLEELLKKIKRELEENIKRNRELLKKLEENLRRNEEKNRKLLEEIRKRLEDLLREK

SEQ ID NO: 20242 - protein, 62 aa, Artificial Sequence
  Synthetic
EEAEELVRRVEERMKEMVKRVHEVSEKNLRDIKKWLEDVNRISKETLDRLRELLKEAERRVR

SEQ ID NO: 20243 - protein, 60 aa, Artificial Sequence
  Synthetic
SLREELEELLKRIKERLKRLIEENRRLLEDLRRNLEENIRRNERTVEELKRDVKRLLDEK

SEQ ID NO: 20244 - protein, 60 aa, Artificial Sequence
  Synthetic
AEELVRRVKEEMERAVEEVKKTSEENLKAIKTWLEEVNRISEETLRRMREVLKELREDAK

SEQ ID NO: 20245 - protein, 60 aa, Artificial Sequence
  Synthetic
RLVEELEKLLKDSHDKDRKLIRENEELLKELKRNLDENIKTNEELVDRIRKRVEDLLREK

SEQ ID NO: 20246 - protein, 60 aa, Artificial Sequence
  Synthetic
AEDLVRRVEKEARDSSDESRRISEENLKEIKKWLDEVNEISKRTLEDAKRLLEDLERKAT

SEQ ID NO: 20247 - protein, 60 aa, Artificial Sequence
  Synthetic
DLEEELKTVLDRARKDVKRLKEELERILEEVKRMVEELDKRLEDLDEEVREKVKRLIDEK

SEQ ID NO: 20248 - protein, 59 aa, Artificial Sequence
  Synthetic
ERDVKRVLREAEELLKRVRDLVEKVLREIKRILEEVEELNRRIIRTSREILKRVEEEVK

SEQ ID NO: 20249 - protein, 60 aa, Artificial Sequence
  Synthetic
SLEERLDKVRRRVEEEIKRLEDRLEELDRRVAETVKRLDDEARKLDEELRERVKDIIRKK

SEQ ID NO: 20250 - protein, 59 aa, Artificial Sequence
  Synthetic
EEKVKRVIEEMEEIVKEVRKRVDEVIKTSEEILRRVRELNKEILKESEDLAEEVRKKAT

SEQ ID NO: 20251 - protein, 60 aa, Artificial Sequence
  Synthetic
KLEDELRKILEENRRIVKELEERMKRLDEAVRKAVEDLARSNEESNKRVKEVVDDLIRKK

SEQ ID NO: 20252 - protein, 59 aa, Artificial Sequence
  Synthetic
EEDVKKVLDDIKESSDRVRREIEEVLKESEERLRRVEKKNEDIDRRSEEILDDVRRKAK

SEQ ID NO: 20253 - protein, 60 aa, Artificial Sequence
  Synthetic
SLEEKARDVLRRSKELNDENRERAERMLDTNRRIADKLREEVERILREVEETVRRLIDEK

SEQ ID NO: 20254 - protein, 59 aa, Artificial Sequence
  Synthetic
EDVVERLLKEVEDSSRRVHKRSEELLRESREISERVRETVKKLLEDVERLLRKVTKEVK

SEQ ID NO: 20255 - protein, 60 aa, Artificial Sequence
  Synthetic
SLEDELREVLERSREKNERLRREAKKLLDTDRERVREILREAEKVLEEVKRTVEDLVREK

SEQ ID NO: 20256 - protein, 59 aa, Artificial Sequence
  Synthetic
EKVVEELLKRVEDSSKKVEDDVRRLLKEVEKISTELEELAKELVEEVRRIVKEVADRVK

SEQ ID NO: 20257 - protein, 60 aa, Artificial Sequence
  Synthetic
SLEERAEKILRDSKRTNEKNEEDVRRLLERNERRVRKIEEEAKKVLEDVRREVERLIREK

SEQ ID NO: 20258 - protein, 59 aa, Artificial Sequence
  Synthetic
EDVVRKLLDEVRESSERVHRKSEELLRRVEEISRTVEREVKKLLDRVRRVLEEAEKEVR

SEQ ID NO: 20259 - protein, 60 aa, Artificial Sequence
  Synthetic
DESRELVERVERVVRKVEKDHERLDRANKESTDRVREAVRRLDEENREVVRKVEDEVKKV

SEQ ID NO: 20260 - protein, 55 aa, Artificial Sequence
  Synthetic
KEAERLLDDVRRKLEELVRNAERSLEESRKTNEELEKRVRESLKEVERVLRELEK

SEQ ID NO: 20261 - protein, 60 aa, Artificial Sequence
  Synthetic
RETEEVIKTLEEVVKEVEERVRRLDEENKESTERVKKTVDDLDEENKRVVREVERRVKEV

SEQ ID NO: 20262 - protein, 55 aa, Artificial Sequence
  Synthetic
KRMEEVLKRVDERLKELERKVTDSLRRSREVNKRLRDKVEKSLREVEKVLEDLKR

SEQ ID NO: 20263 - protein, 60 aa, Artificial Sequence
  Synthetic
SLEERLREILKRNKEDVEDIRRRLEEILKRNKEEIDRLREELRRILEEVKREVKELIKRK

SEQ ID NO: 20264 - protein, 59 aa, Artificial Sequence
  Synthetic
EKTAEEVIERIKKLTEDVRRDVERVIREIEKSSDDLRKVVKDVIDDIKRLLKELREEIN

SEQ ID NO: 20265 - protein, 60 aa, Artificial Sequence
  Synthetic
SLEERLRKILTENERVIRKLERDLEENLERNKKTVKEIEDRLRKLDEDVERLVRELLRRK

SEQ ID NO: 20266 - protein, 59 aa, Artificial Sequence
  Synthetic
KDTAEEVIKEIEELTRRLEEEVRRVNERSDKSNEDVRRRVKEVEDESRDLARRLAERVN

SEQ ID NO: 20267 - protein, 60 aa, Artificial Sequence
  Synthetic
SLEERLRKILEKVKRTVDESRKRSKRLLEENRETMDRLREEAEEILERVKEKIKELVDRK

SEQ ID NO: 20268 - protein, 62 aa, Artificial Sequence
  Synthetic
EEAEKLVEEVIRDLDRVADELRELSKRLSDRSRESNERVRRTVKEVIKEIKRVLKELEEKVK

SEQ ID NO: 20269 - protein, 60 aa, Artificial Sequence
  Synthetic
DLRERMEKLLKEVKDEIDKSEKKSEDNLRTNKKDVDEIRKRLKRILDEVKEELRKLIDEK

SEQ ID NO: 20270 - protein, 60 aa, Artificial Sequence
  Synthetic
AEELVDRVAKRIRRVVEDVKRKSEDLNRKSNESNKRVRDLVERVKEEIDKVRDELRKSVK

SEQ ID NO: 20271 - protein, 60 aa, Artificial Sequence
  Synthetic
SEEERIRELLERVRRRLEESKKKSKDVADEVKETNDESRERSEKLLREVEERLRELLREL

SEQ ID NO: 20272 - protein, 56 aa, Artificial Sequence
  Synthetic
VEELRKEVEEVVERVRRISERLTEELRRSSERVKRISERLLEDLERVVRDVARRVK

SEQ ID NO: 20273 - protein, 60 aa, Artificial Sequence
  Synthetic
SEEERIRELLERVDRRLKESEKRSTDVARRVREENKELEKAARKILEDARRELEKLLREI

SEQ ID NO: 20274 - protein, 56 aa, Artificial Sequence
  Synthetic
VEELIKRVEDMVREVEKTSRKLIEELKRSSDEVRKMVEELLRRLERVLEEVKKRVK

SEQ ID NO: 20275 - protein, 58 aa, Artificial Sequence
  Synthetic
KDEETVTKLLEDVERKNRESEKDSRKIVEDVKDENRKLEDEARKSLEDSERKLERLER

SEQ ID NO: 20276 - protein, 56 aa, Artificial Sequence
  Synthetic
VRELAKRLRESTERVEEISRRLIKELEDSSDKVRKVVEDLLRENKEAVRRVAEEAT

SEQ ID NO: 20277 - protein, 60 aa, Artificial Sequence
  Synthetic
SELEKVEEDIRRLVERVKKIAEDVERLTRELVKEVRKSTEDSVRDIERLMKELREIARDV

SEQ ID NO: 20278 - protein, 59 aa, Artificial Sequence
  Synthetic
KDAKKRLEDLLDTLRKIVEDVSRRLKELNDRLRKLVEDSKRRNEELLRRLREIVKEIAK

SEQ ID NO: 20279 - protein, 60 aa, Artificial Sequence
  Synthetic
DSDKEVEKRIRELMKEVKDSTKESEDKIRESNERVKESSKRSEDEIRKLMEELDEIAKRV

SEQ ID NO: 20280 - protein, 59 aa, Artificial Sequence
  Synthetic
EDATRRLKKLLDDLKKEVDDSRRRNDELIKETERLIRESAKRNDKLLEDLKKRVDEIRK

SEQ ID NO: 20281 - protein, 60 aa, Artificial Sequence
  Synthetic
DEREEVEKRIRDLAEEVRRIVKRVEDETRRLVEEVKKSSDDSRRTIEKLARELKEITRRV

SEQ ID NO: 20282 - protein, 59 aa, Artificial Sequence
  Synthetic
KEAKDRLEDLLRRLREEVKRVKEKLKKLNDDLRREVEKSKEDNERLLKKLRDEVRKSAT

SEQ ID NO: 20283 - protein, 56 aa, Artificial Sequence
  Synthetic
DEVEKVLREIEKLIKEIREINKRINDRIEELIRRLRERVKKVSRESEELIRDLRRD

SEQ ID NO: 20284 - protein, 56 aa, Artificial Sequence
  Synthetic
ERKAREIIKRVEKVLEEVRRSLETSEKRVRDALREIEERLKENKRRVREVLEEIRK

SEQ ID NO: 20285 - protein, 61 aa, Artificial Sequence
  Synthetic
DEKEKLIKEVEDSTETVKRLVEELSRRSKKITEDVERLVKKLSDESKKILDEVRDLVRKRG

SEQ ID NO: 20286 - protein, 55 aa, Artificial Sequence
  Synthetic
EEADKLRKRSEDMVRRIEEHLKKNLKENKDALDKIRKELRENIETTKKTVDDIRK

SEQ ID NO: 20287 - protein, 61 aa, Artificial Sequence
  Synthetic
DEKDKLIEELDKILEDVRRRVEELSRRSKEITETVKELVKRLSDESERILREVDDVVRKRG

SEQ ID NO: 20288 - protein, 55 aa, Artificial Sequence
  Synthetic
EKAREVRRKVKETVERIEEELRRNIEENREMVERVEREARKNIKDTRKRVEEIRK

SEQ ID NO: 20289 - protein, 60 aa, Artificial Sequence
  Synthetic
RVEEKLEKIKRDIEKLVEDMKESNTRSKRKLEKLVEEMRRNNEELTRRVEELVKKIEDDV

SEQ ID NO: 20290 - protein, 59 aa, Artificial Sequence
  Synthetic
EDLVRRLLEEIRRILEEVRRTDKELLDENERILREVEKLNRDLVKEIEEILKKVEDDVR

SEQ ID NO: 20291 - protein, 58 aa, Artificial Sequence
  Synthetic
SEVEKAIEEIEKVIKEVRDKNRRVLEESKKLIRTVEETNKRNIEEIEKWIKTLDELTD

SEQ ID NO: 20292 - protein, 59 aa, Artificial Sequence
  Synthetic
EDAAKKAKEIIDKLRTLVEEVKRTNDKSLRDTREVVRRVEETLRRVEEKVKKRVDEIRK

SEQ ID NO: 20293 - protein, 58 aa, Artificial Sequence
  Synthetic
SEVEEVIRRIEEVLKELRRKNEEVLRESERANDEVRRVNEKNIRDIKKWLEDVKREVD

SEQ ID NO: 20294 - protein, 59 aa, Artificial Sequence
  Synthetic
EDARRRAEELERRVDKVVREVEKTNKESEEESKKLVDDVRRTLREITERVKDAVEKTLR

SEQ ID NO: 20295 - protein, 60 aa, Artificial Sequence
  Synthetic
SRDEEVARRVERVLEESEKLSKEVAEENEKVLREAREILEDVRKKVEDVARTLRELAKKV

SEQ ID NO: 20296 - protein, 59 aa, Artificial Sequence
  Synthetic
EEAKRRLEDLRRKLEELVKRNEKKLRDLDERLKELVERIERAAEKLLRDLRDLVRKITK

SEQ ID NO: 20297 - protein, 60 aa, Artificial Sequence
  Synthetic
RELEKVEKEVEDVLRDIERSSDEVRRENKRVAREMEESSRKVAEDVERVLRTLEELAKKV

SEQ ID NO: 20298 - protein, 59 aa, Artificial Sequence
  Synthetic
EEAKKRAEELVRRLEELLERNRETLERLDKELKDLVEKNKRTAEKLVKELEELVERIRK

SEQ ID NO: 20299 - protein, 60 aa, Artificial Sequence
  Synthetic
DELERVRREVKRLADESEKVSREVEERVRDTNRKSEEISRRVEKLARELLKKVEEVERRS

SEQ ID NO: 20300 - protein, 59 aa, Artificial Sequence
  Synthetic
EDLKRTLDELRKTIEKLVKDNRETLERLIRESEETIKRNREKLEELKRRLETLLRRVRK

SEQ ID NO: 20301 - protein, 60 aa, Artificial Sequence
  Synthetic
DELEDVRRRVDELVEELERVSRRVAELVKRIIDESRDISRRVARRVEELLRRLREVTKRS

SEQ ID NO: 20302 - protein, 59 aa, Artificial Sequence
  Synthetic
DELRKRLEDLKRKIERLLEDNRRKLEELIRRAEKVVEENERTMRKLKEDAKRLLEEIRK

SEQ ID NO: 20303 - protein, 59 aa, Artificial Sequence
  Synthetic
SVEDLVREVEERVRKVEKDLRELLDRLRRENEDAVRRSRESLRRNEEENKRVVDELRKD

SEQ ID NO: 20304 - protein, 55 aa, Artificial Sequence
  Synthetic
EEVVKKVREVLERVKETVKRVVDRNREVVKRLEDENRKVSEENKRVVEKVKEDAR

SEQ ID NO: 20305 - protein, 59 aa, Artificial Sequence
  Synthetic
SVEELVRRIAEKLRKVLDEIERLVDELRKENEEVVRDIERLVEDNEREVRDVLRKLEKD

SEQ ID NO: 20306 - protein, 55 aa, Artificial Sequence
  Synthetic
EDLVRDAERVLKRVTDEVRRVVKENKDVVRKVREEVERVSEENKRVLEKVTRDTK

SEQ ID NO: 20307 - protein, 60 aa, Artificial Sequence
  Synthetic
DEVETLKREVERLNKEVLDRVRKVIKEIKELDDRVRRENERVIREVERLIEEVRDRVRKN

SEQ ID NO: 20308 - protein, 59 aa, Artificial Sequence
  Synthetic
RRAEKIVKELREHSDEVVREMRELVERSKRHSTKVVEELKKSNKELEEKVRKVVRELEK

SEQ ID NO: 20309 - protein, 60 aa, Artificial Sequence
  Synthetic
SEVEELRERIKELNKRVLDTVRRVLERVKELNEEVDRRNKEVIKEVERLLEEVKREVTRE

SEQ ID NO: 20310 - protein, 59 aa, Artificial Sequence
  Synthetic
RRAEKIVDDIRRHSEDVVRRMRKLVEDSRRHSKRVVEEMERSNRELEERVKRVVEELKR

SEQ ID NO: 20311 - protein, 60 aa, Artificial Sequence
  Synthetic
SEVEELIKEIRRLNEEVRRRNKKVIEEVKKLNEDVKRKNDKVIEDVERLLREVKKRVEDE

SEQ ID NO: 20312 - protein, 59 aa, Artificial Sequence
  Synthetic
RRVEEIVRTIEKHSRDVVREMERSNDESEKHSRKVVREMEKSNKELKKKVEKIVRDLEK

SEQ ID NO: 20313 - protein, 60 aa, Artificial Sequence
  Synthetic
SEVEKLKREVERLNEEVLRRVRKVIEDSKRLNEEVRKRNEDVLKELKDLIREVKRRVEEE

SEQ ID NO: 20314 - protein, 59 aa, Artificial Sequence
  Synthetic
DRMRKIVEDLRRHSEEVVREAEDLVRRSEEDSRRVAREMEKSNEEIEKEARDVVRELER

SEQ ID NO: 20315 - protein, 60 aa, Artificial Sequence
  Synthetic
SEVERVVKEAEDLSRENNKRVKEVVRRAEDTNRRVEDENRKLLKEIKDLLREVKETVKRI

SEQ ID NO: 20316 - protein, 59 aa, Artificial Sequence
  Synthetic
ERVRRLLEEVLRRVAEDVRRSEEELDKVLRDSAESLKRSDKSLRDIVREVEKVLDEIRK

SEQ ID NO: 20317 - protein, 57 aa, Artificial Sequence
  Synthetic
SAEDLLRKLREDVERVMRELRKSNEESRKRVEEVVEEAERILKESRERSEELVRRLN

SEQ ID NO: 20318 - protein, 59 aa, Artificial Sequence
  Synthetic
EEVLRKLAEDVKRVLDKVKEENKRLLEENDRMLEEVRRLLKKLLEESEKVLEEVERKAR

SEQ ID NO: 20319 - protein, 59 aa, Artificial Sequence
  Synthetic
DLREEIRKLREDAKRVIDESRKSVKENEKRNKKLLDESEKSVRENEERNKELIKRVKDR

SEQ ID NO: 20320 - protein, 59 aa, Artificial Sequence
  Synthetic
REVLRKVKEELRRVLEKLRRLNEEASRENERILRELRKKNRDMNEDNRRILEELDEKAR

SEQ ID NO: 20321 - protein, 59 aa, Artificial Sequence
  Synthetic
DMEREVEKLERELRELIKRIRKIVDENRRRNEELLERSRESVRRNEEENRKLLEEVKKS

SEQ ID NO: 20322 - protein, 59 aa, Artificial Sequence
  Synthetic
EKVLREVKEEVRKLLEEIEKTVRDVSRENKRILDELRKKNKRADEENREILKKLREDVR

SEQ ID NO: 20323 - protein, 59 aa, Artificial Sequence
  Synthetic
SMEEEIRRLEEDVRRLVDKSRKSVKENEERNRKLLEESKESVRDNARRNEKLIRDVRRK

SEQ ID NO: 20324 - protein, 59 aa, Artificial Sequence
  Synthetic
REMLEEVLRRLEDALRRLEEENKRVSEDNERILEELRRKNEEADKRNRDILDDLRRRAD

SEQ ID NO: 20325 - protein, 59 aa, Artificial Sequence
  Synthetic
DMEDKVRKLERDVRELIKEVEKIVRDNADENRRVVEESEKSVRELADRARRLIDEIRKG

SEQ ID NO: 20326 - protein, 59 aa, Artificial Sequence
  Synthetic
EDVLREVKERVEEVLDRVRKKVEKVSRENKEIVKEVRKKNEDAVREAEELLKKIREEVR

SEQ ID NO: 20327 - protein, 60 aa, Artificial Sequence
  Synthetic
DEVEEVVRRIEELIKEVEDVDRDIERRVKELDEELRRVDDEIRRRAKKLLDDLEKRVREI

SEQ ID NO: 20328 - protein, 59 aa, Artificial Sequence
  Synthetic
ERVRRILTELRKRVEKVVRDSEKTLRESVERSARLLKESKESLEELERRAREVVERIKK

SEQ ID NO: 20329 - protein, 60 aa, Artificial Sequence
  Synthetic
DELEEAEKKVRDLIRRLREMNERALRESERLIRRLREVDEEIVRRIEDLLKKLREEVERE

SEQ ID NO: 20330 - protein, 59 aa, Artificial Sequence
  Synthetic
REVRKTLKDLEDTVKRVLEESEESARESEKRSRDVLRESERSLRELEKKVRKLLEEVKK

SEQ ID NO: 20331 - protein, 61 aa, Artificial Sequence
  Synthetic
SDVDKVAKEIDDALKDVRRKVDKVRKDNERVNREVEERVRRVTERNRDVIEEVKRRVEEVK

SEQ ID NO: 20332 - protein, 56 aa, Artificial Sequence
  Synthetic
SELVREIERRLEELVKELRKILDELRKRNEDTRRRLEEALKRNREEAERLEREIRK

SEQ ID NO: 20333 - protein, 60 aa, Artificial Sequence
  Synthetic
KDVDEIATELDEVIDRIRKKVKEVVERDEKVNRDVNDEVDKLTERNRRVLDKVLKDVTRR

SEQ ID NO: 20334 - protein, 56 aa, Artificial Sequence
  Synthetic
DRLVDELRKRVEDAKREIREILEKLKRDNDESKKRLERLLKENEDALREILERLRK

SEQ ID NO: 20335 - protein, 61 aa, Artificial Sequence
  Synthetic
DDVEKAVREVEEMLKRVDKEVERVSRENKRVSDEVRKKVKEVERKIKEVLDRIKDEVDRVK

SEQ ID NO: 20336 - protein, 56 aa, Artificial Sequence
  Synthetic
DELVKRLEDKMRRVKEKLKRLLEKNREDSERSERELREILKKITREVEELAKELEK

SEQ ID NO: 20337 - protein, 56 aa, Artificial Sequence
  Synthetic
EEVKKLLEEVRDLLRRVLEEVERSSDEDRKLNERVNEAIEKSIREVEELLRRIDRE

SEQ ID NO: 20338 - protein, 56 aa, Artificial Sequence
  Synthetic
EELVEELKRRVDEVKRRAEEINRENDERNKESKRRLEELNERLEERVRRLEEKLKK

SEQ ID NO: 20339 - protein, 57 aa, Artificial Sequence
  Synthetic
DEVEDLRRRVEKILEDVKRTVETASKRDRELNEEVNRLLRESVERVDRLLDRIRREA

SEQ ID NO: 20340 - protein, 56 aa, Artificial Sequence
  Synthetic
KEIVDRLRKAVEEVSREARKILDENRRRNEESEKRMREINKRLEDKVREVKKELEK

SEQ ID NO: 20341 - protein, 57 aa, Artificial Sequence
  Synthetic
REVDKLREDVRRLLEELLRALRESSKEDEKLNRKVNREVDRVLKEVDDLLEDIKKRV

SEQ ID NO: 20342 - protein, 56 aa, Artificial Sequence
  Synthetic
EEIVKRLEEEVREIVKEIKEINDKNRKKNEDSARKADEKVKELEERVRRVVKELRD

SEQ ID NO: 20343 - protein, 56 aa, Artificial Sequence
  Synthetic
KEVEDLVRRVEKLLRDIDRELKRSSDEDRELNERVNREVDRVLREVDRLLKEIRET

SEQ ID NO: 20344 - protein, 56 aa, Artificial Sequence
  Synthetic
ERIVRTLEKRIRDLVRKAEEIDRENEKRNKESSDRMERLVRELRKRVKRLVEELER

SEQ ID NO: 20345 - protein, 56 aa, Artificial Sequence
  Synthetic
DEMRRLLREVERILEEVERVLEKSVRDDERVNREVNRRLDEVLRRVEDLLRRIEKE

SEQ ID NO: 20346 - protein, 56 aa, Artificial Sequence
  Synthetic
ERLLERVRREVEKVRERADRIDKRLEDTNRRSKDRAEELVRELEKRVEDLKEKAEK

SEQ ID NO: 20347 - protein, 56 aa, Artificial Sequence
  Synthetic
DEVRKLEEEVDRILREVKEMVEDSIRRHKEVNDEIRRRVERVLEEVKTLLDLIREK

SEQ ID NO: 20348 - protein, 56 aa, Artificial Sequence
  Synthetic
KEIVDELRKRVEDVSREAKKLDDDLRENVKRLSEEMKKLVDDLRREVDRLEKERRK

SEQ ID NO: 20349 - protein, 57 aa, Artificial Sequence
  Synthetic
DEVEELRRKVEEILRRIREDVRKSIEDHRDVNRRVLEAVRRSTKRNKDVVDRLRDED

SEQ ID NO: 20350 - protein, 56 aa, Artificial Sequence
  Synthetic
ERIVKRLEDEVRKLVDEMRKLDEELTRNVDEVRREAERLDKENRDENRKLKEELKK

SEQ ID NO: 20351 - protein, 60 aa, Artificial Sequence
  Synthetic
SEMEKVVTDAKELLERLDRELERVIRESDKILDELRRKIEEVIKRSDELLEELDRRIKEN

SEQ ID NO: 20352 - protein, 56 aa, Artificial Sequence
  Synthetic
EELIERVRRLVEELIEKAKKLLEESERKSARLIEDLERLLEESRRKSDKLIKKARK

SEQ ID NO: 20353 - protein, 60 aa, Artificial Sequence
  Synthetic
DEVEEIRKEIEDILRRLRDLLRRVIEDSRRLLDELRERNERVIKESEDLLRDLEDKIRKR

SEQ ID NO: 20354 - protein, 56 aa, Artificial Sequence
  Synthetic
KEIVDRLRDEVRKLEEEAKELLRESNELTRELIDRLEKLNRDSNRKSRELIERLRK

SEQ ID NO: 20355 - protein, 60 aa, Artificial Sequence
  Synthetic
SELEEVEERIKKELDRLEKKMEESIKRDKEINRELNEMLKKSIKDSDDILRELRKEIEDD

SEQ ID NO: 20356 - protein, 59 aa, Artificial Sequence
  Synthetic
KRAEEIVKKLEKEVEDLVRKAKKLVDELRKENEESKKRARELLRRSEEKVKKLVREAEK

SEQ ID NO: 20357 - protein, 56 aa, Artificial Sequence
  Synthetic
DSEELVRTVKKELEDIIRESRKLVEDVARALEKIEKEIEEIVRTTDKELRKLIEEA

SEQ ID NO: 20358 - protein, 55 aa, Artificial Sequence
  Synthetic
EEVVKKVKDLLRELEKHNRTVLEEVKKALDELRRRLEEVHRRSKETLDRIRRDAT

SEQ ID NO: 20359 - protein, 56 aa, Artificial Sequence
  Synthetic
REDELVDTVRKRLKELIEESERLLEEVKKKLEEIKRRVEKILRETEKELRDIIRKN

SEQ ID NO: 20360 - protein, 55 aa, Artificial Sequence
  Synthetic
DKVLEKVRKVLEDLKRENKEVVERVDRVLEDAKRKLEKVHKDSRDALKKLDEDAK

SEQ ID NO: 20361 - protein, 56 aa, Artificial Sequence
  Synthetic
SEKELLDRVKEKLKKIIDDVEEILRRSKKELEKIIRESEKLVEEVKRDLRRLIEEN

SEQ ID NO: 20362 - protein, 55 aa, Artificial Sequence
  Synthetic
EKVVEEVERVLEKLLRDVERVHRRTKEVLDELRKENKKVVEDVRDVLEKARERAR

SEQ ID NO: 20363 - protein, 60 aa, Artificial Sequence
  Synthetic
EEVEDVARKIEKLLEDVRRIDKEISDRNRELLKEVRKIDEKILREIEKLLEELRDTATKD

SEQ ID NO: 20364 - protein, 55 aa, Artificial Sequence
  Synthetic
EEAERIKRELDRIRKESEETVKENEERLRRIKEESRRSVERARTELKRIEDEVRK

SEQ ID NO: 20365 - protein, 60 aa, Artificial Sequence
  Synthetic
KVEDELRKLREEVRRSKEEVEKKVKELDEEVKRSKRESEKKLRDLREEVKRLEDDAERSN

SEQ ID NO: 20366 - protein, 59 aa, Artificial Sequence
  Synthetic
EKFLEEVRERVRKLLDENHKILKEAERRVEELLRRNHKILKEALDRVRKLLKELRDRTR

SEQ ID NO: 20367 - protein, 60 aa, Artificial Sequence
  Synthetic
SIEEILRELREHVKENMERSEEIVRDLTRKVDESTRDSERILEKLKKDVDKLEEDAKRAN

SEQ ID NO: 20368 - protein, 62 aa, Artificial Sequence
  Synthetic
EEAEELLREVRERVERVSRRNEELLKRVERDVERVLRENHELLKRVAEEVERVLKEVRERTK

SEQ ID NO: 20369 - protein, 60 aa, Artificial Sequence
  Synthetic
SIEEILEKLRREVEESEKDSRRSAEELRKHVRENEKRSEDIVRKLTEDVERLERKARSRN

SEQ ID NO: 20370 - protein, 62 aa, Artificial Sequence
  Synthetic
EEAKELVREVAERVEDVLRKNHEINKTNAEAVKKWSEDNRKLLEDVRREVERVLKELEKEMT

SEQ ID NO: 20371 - protein, 59 aa, Artificial Sequence
  Synthetic
DEVRKLVEELRKINEDDKRRSDKNFDDNRKLAEDVKRVLERNVEENRKMAKRLEEVLRN

SEQ ID NO: 20372 - protein, 55 aa, Artificial Sequence
  Synthetic
EKLLKEAEERIRRNAEENRKLLERSKKALEEVERRARKLLEESRRALEELKKRAD

SEQ ID NO: 20373 - protein, 59 aa, Artificial Sequence
  Synthetic
DEVRELVKELRELNKRDKKRSKELRDKLEEANREDEEKTRKNKEDNERMAREVERVLRD

SEQ ID NO: 20374 - protein, 55 aa, Artificial Sequence
  Synthetic
ERLLKEAEELIRRNEEENRRILREVEERIKKNEDDNRRVLKRSREELERVEREAR

SEQ ID NO: 20375 - protein, 59 aa, Artificial Sequence
  Synthetic
DEVDKLRKELEDANARDREKSKENKDENDKALKELEEVLEKLKRELEEIVRRVKEVLDK

SEQ ID NO: 20376 - protein, 55 aa, Artificial Sequence
  Synthetic
EEILKKIEKEIRTNREENERLLKESEDELKRLEDEMREILERIKRLIEEVEERAR

SEQ ID NO: 20377 - protein, 59 aa, Artificial Sequence
  Synthetic
DEVRELVKELERINKEDRDKSRENFKRNADIAKEVEDNLERNEEENRKVEEEVRKVLRD

SEQ ID NO: 20378 - protein, 55 aa, Artificial Sequence
  Synthetic
EDLLRDAKRKIDENKEENERLLKESRKLLERVRKRAEELLRKSRKALEDLKEEAK

SEQ ID NO: 20379 - protein, 59 aa, Artificial Sequence
  Synthetic
SEVDKLEKEVRDANERDRRNSERNRKENEEMLRRVERVLRELKKKLEEAIRRARKVLDD

SEQ ID NO: 20380 - protein, 55 aa, Artificial Sequence
  Synthetic
ERILERIEELIRDNAKRNEDLLRRSKEMLDELRKKAKEILDRIRKLIKEVEDKAR

SEQ ID NO: 20381 - protein, 60 aa, Artificial Sequence
  Synthetic
DEVERVVEKLKTLIEEWKRLTEEIEKKNEELIRRIEKVLEDLFRENEKLARDIKREIDEL

SEQ ID NO: 20382 - protein, 55 aa, Artificial Sequence
  Synthetic
EELLRRIEEDIERLERTDREVLKRSEKKIRELRERAKELLKRSEEIIKKLEDEAR

SEQ ID NO: 20383 - protein, 60 aa, Artificial Sequence
  Synthetic
SKDDELKRKIDELIDRWRRLTEEIKKKNDELVKKWEKLTKEVTDHSRDLNRKIREELERL

SEQ ID NO: 20384 - protein, 55 aa, Artificial Sequence
  Synthetic
ERLLEEIEERIEKLERDDKKVLDDSRKKIDDLRKRDEEVIRRNRESIDRLRREAD

SEQ ID NO: 20385 - protein, 60 aa, Artificial Sequence
  Synthetic
DEVETVDDRVKKVIRKLEELLRELAKLNKDIVDDIRRRLKEVEERNRKLAEDIERLLEEG

SEQ ID NO: 20386 - protein, 55 aa, Artificial Sequence
  Synthetic
EDVIKKVRDEAERIRREVRRLDEESRKTVKRLLDEVRELNRRSEEELRELRRRIE

SEQ ID NO: 20387 - protein, 57 aa, Artificial Sequence
  Synthetic
SELEEVRERLRKLIEDLKRLNEESLKENREIIKALRELNERSLRENKELIKRLEDSN

SEQ ID NO: 20388 - protein, 58 aa, Artificial Sequence
  Synthetic
DEARTIIEEIKRRVDELRKHIEESIKEVKKLNDEVEKHIRESIKESEEDLKRLKDRID

SEQ ID NO: 20389 - protein, 60 aa, Artificial Sequence
  Synthetic
KDDEDVDEKIRRAIKKNEELSREIEDKIRRILKKHEDLTRDLAREIREVVRKLRELSKRG

SEQ ID NO: 20390 - protein, 55 aa, Artificial Sequence
  Synthetic
EELLRKVEELLRRLEEENRKILKEVDERLKDLEKKDRDLLEEAKKLLEDVERELR

SEQ ID NO: 20391 - protein, 60 aa, Artificial Sequence
  Synthetic
SELEKLIKELRDLVRESEERLRELVRKVKELIKRSEDEVERLLDRSRELAKELEEEIRRK

SEQ ID NO: 20392 - protein, 59 aa, Artificial Sequence
  Synthetic
REVLDKLKKDAKRVNDDSERIIKRADEEVKRVNEESKRMLEENEKMNRDLVRRIRERIK

SEQ ID NO: 20393 - protein, 56 aa, Artificial Sequence
  Synthetic
DLEEMLTEVERLARELEEESKKIRKEVERLARELEEESKEINKRIKDKADDLKEKL

SEQ ID NO: 20394 - protein, 59 aa, Artificial Sequence
  Synthetic
REIIKRLVDEVKKVIDELMKKNRKLLEDVERILTELSERNRDLARKVDKLIRDLEKRAR

SEQ ID NO: 20395 - protein, 60 aa, Artificial Sequence
  Synthetic
SKLEEVKERVKKLSKRNLDVAKRVLDEIDKLIKEDLKKTEDALRRIKELLDRLREMKRRG

SEQ ID NO: 20396 - protein, 59 aa, Artificial Sequence
  Synthetic
ERIRRIVKEVRELVRRNDEEVDKIVEEVKRLLERSSRENEKVVREVEELLKRLEEEARK

SEQ ID NO: 20397 - protein, 60 aa, Artificial Sequence
  Synthetic
DDVERLLKRVKELIDDDLRKTEKALREIEKLSRDNKKRTEDVLREIEERLRRLEEATRRG

SEQ ID NO: 20398 - protein, 59 aa, Artificial Sequence
  Synthetic
ERVRKIIRDVERLLEESTRRNEEAVKRVERLLEENKKRNEDVVREVEKELRRLREEARK

SEQ ID NO: 20399 - protein, 60 aa, Artificial Sequence
  Synthetic
SDIEKVLEDIRRLSKKNVDDSKRVLDEIRELSKRNLELVKEVLERIRRLLKKLEEARRRG

SEQ ID NO: 20400 - protein, 59 aa, Artificial Sequence
  Synthetic
ERIRKIVEDVKELLDRNREENERIVREVEKLLDENRKEVEKILREVERLLEELEKRERD

SEQ ID NO: 20401 - protein, 60 aa, Artificial Sequence
  Synthetic
KEVEDLLKRIRDLLKRVEETSREVLEEIKRLIDRDRKHSKEVLDEIKELLKRLIEAAKRG

SEQ ID NO: 20402 - protein, 59 aa, Artificial Sequence
  Synthetic
ERVRTIIREVEKLLKELEDKNDEIVRRVEELLRKSHEDNRRIAEEVREMLKRLEDEMRR

SEQ ID NO: 20403 - protein, 61 aa, Artificial Sequence
  Synthetic
SSLEKVEKDIRKLNDDSKKEAKRVTEENRKSNEDVERELRKIVEEVRRLIKDVEDKIRKDG

SEQ ID NO: 20404 - protein, 59 aa, Artificial Sequence
  Synthetic
ERVKRIVDELRKSLRKLEEDVKELIKENKESNDRLRERVERILKELRELLRELEEKVKT

SEQ ID NO: 20405 - protein, 61 aa, Artificial Sequence
  Synthetic
SEVERLVEEVRKSNKKWEEESRELTERNKKLNRETTKRAEDLLERVRELVRTVTEIIKREG

SEQ ID NO: 20406 - protein, 59 aa, Artificial Sequence
  Synthetic
ERLKRIVEEIRDSVRRLKEKSEELVRRNEESNDRLRRRVEEIAKEARDLVRRLEEEVRR

SEQ ID NO: 20407 - protein, 61 aa, Artificial Sequence
  Synthetic
SEAERVLEEVRRLNDKSKKTAEKLTEENKRLNKRTTDFLKEVLERIEELVRRVEDRIRKEG

SEQ ID NO: 20408 - protein, 59 aa, Artificial Sequence
  Synthetic
KRVKDIVREIRDSVRKLEEEVRKLIRENEKSNKDLRRRVRKIEEDIKRIIRELEERVRK

SEQ ID NO: 20409 - protein, 61 aa, Artificial Sequence
  Synthetic
SELEKILKDIEDLVRKWLEESKDLLRKLKKLNEDTTERLRRLLDELRKLIKDLLDKIRKDG

SEQ ID NO: 20410 - protein, 59 aa, Artificial Sequence
  Synthetic
KRVKDIVKKIEELVKKAKEESKKIVEEVRRSVKRLEEEVRKIEKDIKDLIDELRKKVTT

SEQ ID NO: 20411 - protein, 59 aa, Artificial Sequence
  Synthetic
SEVEDLRRELEEINKEWNKRTKDLVKEVEEVNRDINKKIRDLLREARRLVDEIRRLIEK

SEQ ID NO: 20412 - protein, 56 aa, Artificial Sequence
  Synthetic
EEVIKELRKLLEESERRAREMNKRLDRLLEESKKDVDRVREEIKRLVDEIEDRARK

SEQ ID NO: 20413 - protein, 59 aa, Artificial Sequence
  Synthetic
DEIEEVLKRLEEIVKTWDERTKRLTERVRTVNREVNERHKKLTRDLRELAREVLDLVRQ

SEQ ID NO: 20414 - protein, 56 aa, Artificial Sequence
  Synthetic
REMLRELEERIRTVEDKVRRVNEELRELLKTSNRRSEEIEKELEKILREIRERARK

SEQ ID NO: 20415 - protein, 59 aa, Artificial Sequence
  Synthetic
DEVRKVLEDLRKIVREWEERTERLLRDLKRINEEINRRVEKLTEELRRLVKEIKKLTDD

SEQ ID NO: 20416 - protein, 56 aa, Artificial Sequence
  Synthetic
EDVLREADKIIEDVEREARRVNKELKDLLDESAERIERIIREIERLVEKIKRDADR

SEQ ID NO: 20417 - protein, 59 aa, Artificial Sequence
  Synthetic
SEIEKVLDELREINRRINETAKEILRRLKEINERTKKEIDRLLDELRKLLRRVEELRKE

SEQ ID NO: 20418 - protein, 56 aa, Artificial Sequence
  Synthetic
EEALKDLERLLRESEKRIREIIKRIRESVEKLERDVRRVIDEIRRRLEEIERRLRK

SEQ ID NO: 20419 - protein, 55 aa, Artificial Sequence
  Synthetic
KEVEEALEELRRILREWEEVTKRLEERVEEINRRSLEELRRLKEEVEEIAKRIRD

SEQ ID NO: 20420 - protein, 56 aa, Artificial Sequence
  Synthetic
KEVLEELDKLVKDIKRKVDEVNEKWKESSKRLEDEHRKVIKELEELVKRVEEELRR

SEQ ID NO: 20421 - protein, 55 aa, Artificial Sequence
  Synthetic
KEVEDALKKAEDILRRWEEVTKKLKDEARKINEDSRRKLKRLKEESREIVERIKK

SEQ ID NO: 20422 - protein, 56 aa, Artificial Sequence
  Synthetic
EEVLRRLEKLVEDIKRKVAKVNDEWRKSSEDLEREHRKVHRESEKLIRDVEDRLRK

SEQ ID NO: 20423 - protein, 55 aa, Artificial Sequence
  Synthetic
SEVEEVRREVKRVVDDWRRVTKKLLDDIRRISEESKKIIRDLKEAAKTMIREVER

SEQ ID NO: 20424 - protein, 56 aa, Artificial Sequence
  Synthetic
EEVLKELEKLLEDLRREVEEVNERLKRLLDENEKRIREVLRELKKLLRDLDEKLRR

SEQ ID NO: 20425 - protein, 60 aa, Artificial Sequence
  Synthetic
DELERVREEVKKLSDTSREKLERALKKARDLLEENERRLRELKKEVEELIRRIEEKLKDR

SEQ ID NO: 20426 - protein, 59 aa, Artificial Sequence
  Synthetic
EELRKVLTDIERLLRENKKELDEVLKEVEKLSREADDKNRKVLKEIKELLDELKKRAKD

SEQ ID NO: 20427 - protein, 60 aa, Artificial Sequence
  Synthetic
SEVERMLEEVERISEESKRKLEEVLRRVEEIIKAIERTLEKVLKDDEEIIRRIEDTLRRR

SEQ ID NO: 20428 - protein, 56 aa, Artificial Sequence
  Synthetic
REVVKTIDDLLRENERRVDEALEEIEKRARDLREKVKELEERLDRTNRKLKKKVED

SEQ ID NO: 20429 - protein, 57 aa, Artificial Sequence
  Synthetic
KEVEDIIEESRKLDKELEDEIRRIIEESRRLNEELEEIARRIDEEIKELLERLKRRD

SEQ ID NO: 20430 - protein, 59 aa, Artificial Sequence
  Synthetic
KEDVERLVRSNREVARDVREKLKRLLEHNKEVVDRVREELKRLLDEARRVIEEVRKKAD

SEQ ID NO: 20431 - protein, 60 aa, Artificial Sequence
  Synthetic
DELERIDEKIKRDVEEHKRETKRILDESERLNREVKKRLEEIRERIRRLAEEIRKEIERD

SEQ ID NO: 20432 - protein, 59 aa, Artificial Sequence
  Synthetic
ERKLEKVMEDVKRLIDEARKENEDVARRMERSNKELKRKLDEIRREVEELIKELRERTK

SEQ ID NO: 20433 - protein, 60 aa, Artificial Sequence
  Synthetic
DDLERAREEVADLIRKHEEKTRRILEESRRLNERHRELSKRILDEIRKLAERIEELIKRE

SEQ ID NO: 20434 - protein, 59 aa, Artificial Sequence
  Synthetic
KEELDRIEEELKRLIDTLREKNREVEKRARDSNRDLKRTNDEIAKEVRELIKKLREDLK

SEQ ID NO: 20435 - protein, 60 aa, Artificial Sequence
  Synthetic
RELETIADRIRKLSRENSEVLKEIARRIERLVEEHRKESERILKEIKELADDITRLIRED

SEQ ID NO: 20436 - protein, 59 aa, Artificial Sequence
  Synthetic
KEELDKVEEEVRRLIRTNREILRTIEKRVRDLIEELKRRNDEIARRVEELIKRLRRETD

SEQ ID NO: 20437 - protein, 60 aa, Artificial Sequence
  Synthetic
SELEKVADELRKLIKDDNDLLDEILDRIRKLSKENEKRLREILKEIRKLMDEISKLIKKD

SEQ ID NO: 20438 - protein, 59 aa, Artificial Sequence
  Synthetic
KEELDKIREELERLIKRNKEKLDEIRREVDELIKKNEETLKRIEEEVRKLIEDLKEELR

SEQ ID NO: 20439 - protein, 60 aa, Artificial Sequence
  Synthetic
SDLEKIEKEIEDLVKRDNEVDKKVMREIRELSKENKERLRKILEDLRREAKKIKDDIERE

SEQ ID NO: 20440 - protein, 59 aa, Artificial Sequence
  Synthetic
KEKLKRVEKKVRELIKRNRDHNERTREDVEKLIRDNEDTLRRIEEEIERLIEKLKRDTK

SEQ ID NO: 20441 - protein, 57 aa, Artificial Sequence
  Synthetic
KEVEDAVKELEDLLRKNEDKTRKIVEDMRRSNKDLEDHSRKSEEEVRKLLDDLRRAG

SEQ ID NO: 20442 - protein, 56 aa, Artificial Sequence
  Synthetic
IKTLLDRVRKLAEEDNERLDRLRRESEELNERVRRVDKKLLEEIRRKAKKVEDDTR

SEQ ID NO: 20443 - protein, 57 aa, Artificial Sequence
  Synthetic
DEVREVDRRLKELLRRLKETIDEIRRRMEESNRRLEDHSRKSEEEARKLLEELERKG

SEQ ID NO: 20444 - protein, 56 aa, Artificial Sequence
  Synthetic
LEELLRRLEELAERAERKLEKALRDSEDLNRKVTEVDRRLLKEIRDLVEKVERERR

SEQ ID NO: 20445 - protein, 57 aa, Artificial Sequence
  Synthetic
SEDEKVRKEAEDLLRELEKHSRDTERRARKSNRDNNEHSKESVKDLRRLLERLRKAG

SEQ ID NO: 20446 - protein, 56 aa, Artificial Sequence
  Synthetic
IRKLLEEVRKLVDDLRKRDEEIMKTSERLNEEDNRKDRRLVEDVKRLADEVEKKTR

SEQ ID NO: 20447 - protein, 57 aa, Artificial Sequence
  Synthetic
SKVDDVKRRIRKLLEDSKKRSRESIERVERSNRRLEKHSRDSARRAKELLDKLREEG

SEQ ID NO: 20448 - protein, 56 aa, Artificial Sequence
  Synthetic
IDELLERLKELAKRIKELDDRLLRELEEINKTTEKLDRDLLKEIKERIDELRKREK

SEQ ID NO: 20449 - protein, 57 aa, Artificial Sequence
  Synthetic
DKVERVKKEVRDLLRRLEKHSEDSVREIDTSNKRLEEHSRRSKEELKRLLRKLKEAG

SEQ ID NO: 20450 - protein, 56 aa, Artificial Sequence
  Synthetic
IDRVLEEVRKIIRRIEEEDRRLLKEIRDINETTERLDRKLLDELRKVVKDIEDRER

SEQ ID NO: 20451 - protein, 60 aa, Artificial Sequence
  Synthetic
SELEEVKKKVEKLIRDVEKVSEDTRREVERLIREVEEATKEHLDRVRRLIEELREVRKAG

SEQ ID NO: 20452 - protein, 62 aa, Artificial Sequence
  Synthetic
DRLRERLERLAKEIEDLLRRLREISRTIEERARRLLEELKKRSEDLRKTAEELLKEIDEELK

SEQ ID NO: 20453 - protein, 57 aa, Artificial Sequence
  Synthetic
DEVETIKKKAEDLLRDSKRKTDELTKRMEELLERSKEDSERLIRRLRELLERLRRRG

SEQ ID NO: 20454 - protein, 56 aa, Artificial Sequence
  Synthetic
EEDVDREVKRLVDESKKIIERVEEDVKRLIRESEKKSRDVERRVEELERKAREDER

SEQ ID NO: 20455 - protein, 56 aa, Artificial Sequence
  Synthetic
SEVEKIKREMEKLLEEHKKLVDDIRREAERLHEEHRRLSDKIREDLKRLLEELRRS

SEQ ID NO: 20456 - protein, 59 aa, Artificial Sequence
  Synthetic
RKELDRLRREVEKVVRELKERNKELLKRLEEAVEELKRRNRKLLEDARRVVEEIKERAR

SEQ ID NO: 20457 - protein, 56 aa, Artificial Sequence
  Synthetic
STVERIDEELKRLHTEHKKLSDDIKREAERLHEEHRRLSEEIRERLERLLEELRRR

SEQ ID NO: 20458 - protein, 59 aa, Artificial Sequence
  Synthetic
EEDLDKILRDLERTAKELKDRNRRLLEEVERVVRELKRRNKELLKTVERVAREIERRAE

SEQ ID NO: 20459 - protein, 56 aa, Artificial Sequence
  Synthetic
REVEEIDKELRRLHEEHRRLVEDIRRKLKKLHDEHRRLSEEIKRRLEELIRKLRED

SEQ ID NO: 20460 - protein, 59 aa, Artificial Sequence
  Synthetic
REELTKLLEEVKRVVDRLKEENKRLLKEVKEVAERLKRENERLLEELRRVAEEVRERTR

SEQ ID NO: 20461 - protein, 56 aa, Artificial Sequence
  Synthetic
KEVEEIREEAKRLHEEHRRLSKRIDDELKRLHDEHKRLSDEIRKELERLIEELKKG

SEQ ID NO: 20462 - protein, 59 aa, Artificial Sequence
  Synthetic
RDKARKLLEEVRRMVKRLKEENKRLLEEVRKVVEDLKRRNKELLEKLKREAERVKEEAK

SEQ ID NO: 20463 - protein, 56 aa, Artificial Sequence
  Synthetic
SEVDEIRKRLEDLHREHRELSREIEERLKKLHDEHRRLVEEIIRRARELLEDLRRE

SEQ ID NO: 20464 - protein, 59 aa, Artificial Sequence
  Synthetic
RDKVERLLREVKKVVDKLKKDNEKLLRDLKRVVDELKEKNKRLLEEVKRVVDDIRRRAK

SEQ ID NO: 20465 - protein, 60 aa, Artificial Sequence
  Synthetic
DEVREVERKIDKLAKDLKDELRRLLKEYEELVERLEELLERILRESEKLAEELKEELKRR

SEQ ID NO: 20466 - protein, 55 aa, Artificial Sequence
  Synthetic
DKVRKRIEELVKELKDILEEIKRRVEELDERSKRILKEIADRNRKLVDELRKTLE

SEQ ID NO: 20467 - protein, 60 aa, Artificial Sequence
  Synthetic
SEVEKALEDVRRLVEELKKELKEILERYKRLVDKLKKENREDHERSKELAERLKDLLRKS

SEQ ID NO: 20468 - protein, 55 aa, Artificial Sequence
  Synthetic
EKVRDTLRKLLEELDDLVRRIKTTLRKLVEESRRSLRKNEEDNRKLVEELREEAR

SEQ ID NO: 20469 - protein, 60 aa, Artificial Sequence
  Synthetic
DEVREVLREAREVVKRLKDRLRRILEESRRVVDELRDKNRKDHETYRKVVEELKKRLEER

SEQ ID NO: 20470 - protein, 55 aa, Artificial Sequence
  Synthetic
EEVRKDIERLFKELEDILKEIKEDNRRLVEDIKRSLEKNKRDLEKLVKESEDEER

SEQ ID NO: 20471 - protein, 60 aa, Artificial Sequence
  Synthetic
DEVRKVLEDARRLVEKLERDLEKVLEDYKRLVDELKERNERSHRESRRLAEELKKELERE

SEQ ID NO: 20472 - protein, 55 aa, Artificial Sequence
  Synthetic
DEVKERIDRLVKRLEDLARRIKEELDKLVKESRESLERNKTEVKKLIRELEETVR

SEQ ID NO: 20473 - protein, 60 aa, Artificial Sequence
  Synthetic
SEVEDVLTKIEDVVRKLEEENKRSHDESRKLADELKKENKEDHDRYRKEVERLKKELEER

SEQ ID NO: 20474 - protein, 55 aa, Artificial Sequence
  Synthetic
DKVRKRVEELVKEIEKSARDNEEAVKRLAEELRDSARRNKEELEKLVKESDDELK

SEQ ID NO: 20475 - protein, 56 aa, Artificial Sequence
  Synthetic
RETEEIEKEIRRLVKELRELNDEVEDRVRKLIKELKELNDRSERTLRELADELRRS

SEQ ID NO: 20476 - protein, 59 aa, Artificial Sequence
  Synthetic
DDVVRKVLERAERLVREDKKHTKEVLERIKELVDRDKKHTRDVNEEVKRLVEEIKKKTK

SEQ ID NO: 20477 - protein, 56 aa, Artificial Sequence
  Synthetic
SEIEEIEKRIEDLARELKELNKEVEERVKKLIEDLRRLNEESRESTDRLMDELRKA

SEQ ID NO: 20478 - protein, 59 aa, Artificial Sequence
  Synthetic
DEVVRRVLEEIERLVRRDKEHTERVLRTIEKLVREDEEHTKRVNEEIRKLAKEIEERAR

SEQ ID NO: 20479 - protein, 56 aa, Artificial Sequence
  Synthetic
REIEELRKEIETLIRENEELNRRSKETSEELIRRLKKLNRDVEEEVRRLVKDLRDR

SEQ ID NO: 20480 - protein, 59 aa, Artificial Sequence
  Synthetic
DEVVRRVAEEARRLSKRNKDAIREVNETSRRLATRDAKHTRDVLREIKRLADEIRERTR

SEQ ID NO: 20481 - protein, 56 aa, Artificial Sequence
  Synthetic
SEIEKAEEDVKRLIKENEELNRRSEETSRKLVEENERLNKEVEDRVRKLIKELEDN

SEQ ID NO: 20482 - protein, 59 aa, Artificial Sequence
  Synthetic
DDVVRRILKRIEDLSRKNKRDIEEVNKESERLSRENKKKIKDVLEEIRRLVERIEREVR

SEQ ID NO: 20483 - protein, 60 aa, Artificial Sequence
  Synthetic
SEIEKVLEDLRRLADRHRKRVEEILREAEDSNRKTKKKHREVEKEVKELADKLKDEIRRD

SEQ ID NO: 20484 - protein, 58 aa, Artificial Sequence
  Synthetic
RRLDEVEKDLRRLIRELKRLNEEVEKRVRDLIKENEELNKRIHDDLRRLIKELEDETR

SEQ ID NO: 20485 - protein, 60 aa, Artificial Sequence
  Synthetic
SDIEKVLDDLRKLAEEIERAHEEVAREVRELSKRNKEVIKDILRRAKELAERIKELIDRS

SEQ ID NO: 20486 - protein, 58 aa, Artificial Sequence
  Synthetic
DDLRKVEETLRELIRKIRKKNEEIRRDLRRLIEENKELLERVRREVERLIEDIKRKLK

SEQ ID NO: 20487 - protein, 60 aa, Artificial Sequence
  Synthetic
SEIEKMLEELRRLSERNKRTTEEIEKRLRDSNRDTKRKHEEALRTIKELIDRIKRAIREE

SEQ ID NO: 20488 - protein, 58 aa, Artificial Sequence
  Synthetic
DKLRKAADDVRRLIEENRRLDERLHEEVKKLIEENRKLNEDINERVRRLIEELRRETK

SEQ ID NO: 20489 - protein, 60 aa, Artificial Sequence
  Synthetic
EEIERALREMRELSRTHKELVEKILRDIAELAKTHERINEDILRKIKKLIDEIADEIRKE

SEQ ID NO: 20490 - protein, 58 aa, Artificial Sequence
  Synthetic
RELDEIAKDVKRLIDENRELLKRVEDEVRRLIRKLEELNRRTEEEVKKLIKKLEDDLK

SEQ ID NO: 20491 - protein, 57 aa, Artificial Sequence
  Synthetic
RELEELEKELRELLRELRRLSEESRKELKKLLDELEELSRRSAKKLKDLLDDLRRRG

SEQ ID NO: 20492 - protein, 56 aa, Artificial Sequence
  Synthetic
IDEVRERLRELIERDKKLNKKLTDDLRRLAERDKRENEKLSKELEDLARKLREDAR

SEQ ID NO: 20493 - protein, 57 aa, Artificial Sequence
  Synthetic
SEIEELEKRIDELLKELRDLSRRIAEEVKRLLEELKKLSKDSEDKLRELLERLKRKG

SEQ ID NO: 20494 - protein, 56 aa, Artificial Sequence
  Synthetic
VEEVLRRLEKLVREDKERLKKVLKDARDLIKKDKDLNEKLSRELEKLVRELEERAR

SEQ ID NO: 20495 - protein, 57 aa, Artificial Sequence
  Synthetic
SEIEDLERRIRKLLEENRKLVDDVAKKLRELLRELRKLSEESRKRLEDLLRKLRKDG

SEQ ID NO: 20496 - protein, 56 aa, Artificial Sequence
  Synthetic
VEEVLRRLEKLSRENKDLIRRIDERIEKLIRDDKRRNREISERARELARKLEDEAR

SEQ ID NO: 20497 - protein, 57 aa, Artificial Sequence
  Synthetic
KESEELEKEIRRLLRELREISRKIEEDARRLIEELRRLTEESERELEELLEKLKRDG

SEQ ID NO: 20498 - protein, 56 aa, Artificial Sequence
  Synthetic
VREVLERLKKLVEEDKRRLKELLDRIRELMERDKRKNKEISERVRKLIKELEDKAR

SEQ ID NO: 20499 - protein, 56 aa, Artificial Sequence
  Synthetic
DEEDRLREELRRLLEELRELSERSRDEVKKLLEDLERLTRESEEKVRRLLEKLKRD

SEQ ID NO: 20500 - protein, 56 aa, Artificial Sequence
  Synthetic
VKRVLEELRRLVEEDKKLNEEITEDARRLIEEDRRLNKKISDEAEKLARELRERAR

SEQ ID NO: 20501 - protein, 57 aa, Artificial Sequence
  Synthetic
DELRDVKRELDRLLRENEEIVERIAETVRRLLEELKKLTKELAEELRKLLEELRKRG

SEQ ID NO: 20502 - protein, 56 aa, Artificial Sequence
  Synthetic
VETVLRRVRELSRDNKRRMRRVLEEAKRLAKEDKERIDKIRKEIEELIKRLKDKAT

SEQ ID NO: 20503 - protein, 56 aa, Artificial Sequence
  Synthetic
DEEEDLERRIKKLLDENRELLKRIAEELRRLLEELRRLTEESADRLRRLLKELKDR

SEQ ID NO: 20504 - protein, 56 aa, Artificial Sequence
  Synthetic
IETLLRELEKLSRDNKELLKKIEKEIRDLIKEDKERNRELSERLRKLVEELKKKAT

SEQ ID NO: 20505 - protein, 57 aa, Artificial Sequence
  Synthetic
REIEEAAKDLDRLLEENKKLVKEVEEELRRLLKENRDLVKESEDRIRKLLEELRRRG

SEQ ID NO: 20506 - protein, 56 aa, Artificial Sequence
  Synthetic
VEEVLRRVRKLSRENKEKIRKILEDVKKLSEDNKRRNEELSRRVKTLVDEIKKRAT

SEQ ID NO: 20507 - protein, 57 aa, Artificial Sequence
  Synthetic
SRIEELEKRIRELLKENRDLVKESEDRVEELLRRNEELVRRSKEKVERLLEELRRKG

SEQ ID NO: 20508 - protein, 56 aa, Artificial Sequence
  Synthetic
VDEVLRRLKKLSDDNKELNERLTRTLEELSRRNADINKKLSDEAEKLIRDLEKRAT

SEQ ID NO: 20509 - protein, 57 aa, Artificial Sequence
  Synthetic
KEIEDAERELRRLLEELKRLLDDVAREVKRLLDENKRLVEKSEEDVKRLLDELREEG

SEQ ID NO: 20510 - protein, 56 aa, Artificial Sequence
  Synthetic
VEEVLRRVRETVERVKKKIKDVLKEIEDLSRENKKLNRDLSERLKKLADDLREKAR

SEQ ID NO: 20511 - protein, 56 aa, Artificial Sequence
  Synthetic
DELEELSREIKKLLEENRRLVRESEEDLRRLNEENRKLVEDSERRVRELLKDLRDR

SEQ ID NO: 20512 - protein, 56 aa, Artificial Sequence
  Synthetic
IEEVRERLRKLSKENKDLNRELTKRSRELNARTKERNEEISRRAEELARKIREDAR

SEQ ID NO: 20513 - protein, 56 aa, Artificial Sequence
  Synthetic
DEKETLARKLDELLRELEKLVRDSAREVEKLNEENRRRLEESRDRLRKLLEKLKRD

SEQ ID NO: 20514 - protein, 56 aa, Artificial Sequence
  Synthetic
IERVDRELKRLAEEIKELNKRITDESRKLNEDTKRVNDKLSRDLEELARDLERRAT

SEQ ID NO: 20515 - protein, 57 aa, Artificial Sequence
  Synthetic
SEIERIERENDRLNEENKKITEDIERELKRLLEENRELSRTIEEELERLLRELRKRN

SEQ ID NO: 20516 - protein, 59 aa, Artificial Sequence
  Synthetic
EKTLRELLKRSEELSKENKDRLKKLLDDLREVSKKNKEDLKRLLREVREVARKVKERAN

SEQ ID NO: 20517 - protein, 57 aa, Artificial Sequence
  Synthetic
DDIERILREMERLLEENKEISDEIRKELKRLLDENRKLSEDVVKALEDLLRDLERRK

SEQ ID NO: 20518 - protein, 59 aa, Artificial Sequence
  Synthetic
KDTLRELARKIRKLSEENKERLKELLRELKKLSDENKERIKKLLKDAEKIIEDVRRRAK

SEQ ID NO: 20519 - protein, 57 aa, Artificial Sequence
  Synthetic
SEIERIDEDNKRLNDENRKLSDRVRRENERLNKENRELSKRVEETLKRLLDELRRRG

SEQ ID NO: 20520 - protein, 59 aa, Artificial Sequence
  Synthetic
KRTLTELLKESRELSKRNKDKIRELLRRSEKLSRENKKRIEDLLRELRRVVEKIKREAD

SEQ ID NO: 20521 - protein, 57 aa, Artificial Sequence
  Synthetic
KEIEDLRRDLDRLLRENRELTREVKEELEKLNRELEELVRRIKRTLDELLKDLERRN

SEQ ID NO: 20522 - protein, 59 aa, Artificial Sequence
  Synthetic
REEIERLREELRKLSEDNKDRIRRILERLRKTVEEIKKRLEDILRRLTEIAKEIEERAR

SEQ ID NO: 20523 - protein, 59 aa, Artificial Sequence
  Synthetic
SELEKLLEDLRRLSERSERELRRLRKELEEIIREIKKKMEENLERNRKVIDEIDKVIKD

SEQ ID NO: 20524 - protein, 58 aa, Artificial Sequence
  Synthetic
EEAKRLKEDAERLLRENERRIDELRKEADELIKELKKRIEDLVKESRRLLEELDRRAK

SEQ ID NO: 20525 - protein, 59 aa, Artificial Sequence
  Synthetic
EELERLEERLDRLIEEAERRLKDNLKKNEDMARKWEEDTKRNEKRNRDLIRRIRKVIKD

SEQ ID NO: 20526 - protein, 58 aa, Artificial Sequence
  Synthetic
RKVKELKRRARELLERLARLIDELRRRSEDLIRRLAEKSERLERESRKLLRDIAEKTT

SEQ ID NO: 20527 - protein, 60 aa, Artificial Sequence
  Synthetic
RELEELKKEAEKVSKESKDLIEKVIRDNEDVSRRSEELIRELMREVKEVIDRLRELIERR

SEQ ID NO: 20528 - protein, 59 aa, Artificial Sequence
  Synthetic
EDKVRRIKEELERLIEENEKLLEESKKRSEDNARRNEELLERLRRELERLARELEEELR

SEQ ID NO: 20529 - protein, 57 aa, Artificial Sequence
  Synthetic
REKEELKKDIERMVEELKKLNKESRDRTRKLIKELEDLVKESDDDTERLARKLEKEV

SEQ ID NO: 20530 - protein, 56 aa, Artificial Sequence
  Synthetic
VEDLLREARKLIEELKRHTEEVIKRNKKLIDELKEIIEDVIRRNRKLVKELEDTAK

SEQ ID NO: 20531 - protein, 57 aa, Artificial Sequence
  Synthetic
SEKEDLKRRLDKLAEDLRRLNKEVDDEVKELARRLRKLNKDSRKRTEDLIRELEKRV

SEQ ID NO: 20532 - protein, 56 aa, Artificial Sequence
  Synthetic
VDELREEIKELIDRLRKHTEEIIRRIRRLFEELRKHSKKVIDDNKRLFDELEKTAR

SEQ ID NO: 20533 - protein, 57 aa, Artificial Sequence
  Synthetic
KEKEDLKRKVDELDKELKKLNEDSRRKTKELIKRLKDINKRLREELEKLADELRKKV

SEQ ID NO: 20534 - protein, 56 aa, Artificial Sequence
  Synthetic
VEELDREITELIKELRRHTEEVIRRNEKLARELEKHSRDIMETIRELIRDLERTAK

SEQ ID NO: 20535 - protein, 57 aa, Artificial Sequence
  Synthetic
SEKERLEKRLREVVRELEKLNEDLDRRLEELARDLERLNEESRRESRKLAEDLKREV

SEQ ID NO: 20536 - protein, 56 aa, Artificial Sequence
  Synthetic
VEEVEERIERLIRDLKRHTEEIKKTIEELMKELREHSREIIKRSRDLFKELKDTTK

SEQ ID NO: 20537 - protein, 60 aa, Artificial Sequence
  Synthetic
SELEKVIEEIREISERSLEKIKRLMEKIKELSDRTAERLRRVLEEIRKIIEEIKELRDRG

SEQ ID NO: 20538 - protein, 59 aa, Artificial Sequence
  Synthetic
KELAKKITEDLKRNEERNRRAIEELERTLRKLEEENRRLIREAEDTLRRLVEELEKKDE

SEQ ID NO: 20539 - protein, 59 aa, Artificial Sequence
  Synthetic
SELEEVLKEAKRLIDEIRKHTRDVSERSKRLLEEDLKHTEEVIKEIRKLIKEILDRIRA

SEQ ID NO: 20540 - protein, 59 aa, Artificial Sequence
  Synthetic
EDDLRRLKETIERLAKDLERLNREHDETNKKLAKDSEDLNRELKKRVEELEEELRRALK

SEQ ID NO: 20541 - protein, 59 aa, Artificial Sequence
  Synthetic
KELEDVLKEIRDLARRIEEHSKKVLREIEELIRRLEEENREVLRRMREEIKKIKEDIRN

SEQ ID NO: 20542 - protein, 59 aa, Artificial Sequence
  Synthetic
KRKLDELRRDVRRLERRLERLNETLKERIDRLAERLEEVDRRLDEELKRLAEELKEELR

SEQ ID NO: 20543 - protein, 60 aa, Artificial Sequence
  Synthetic
DKLDEIKERIERLVETDLRVIKRILEEADELIKENEKLIEKILRDNRRLIEEVEEIIRRD

SEQ ID NO: 20544 - protein, 59 aa, Artificial Sequence
  Synthetic
EKKLRELKKRVDELREESKDLNDKLEKRIRDLKRELKKLNDRHEEELRKLKERLRRATK

SEQ ID NO: 20545 - protein, 60 aa, Artificial Sequence
  Synthetic
DELDEILKTADKLAEDDLDTIRRLLEEVRDLVRKDKEVIKRILEEIDRLIKEVEDIIRRD

SEQ ID NO: 20546 - protein, 59 aa, Artificial Sequence
  Synthetic
EKKLKELEDRVRELKRRSEELLKKVEETLRRLKEESRRLNEELERTIRELEERLRRATK

SEQ ID NO: 20547 - protein, 56 aa, Artificial Sequence
  Synthetic
SKEDRAREELKRLKEELEKLLEEHRKTLEDLNRELKRLVDEHEKSIRELRKELKDS

SEQ ID NO: 20548 - protein, 56 aa, Artificial Sequence
  Synthetic
IDDVIRRVRETIDEVVRRIEELLEENRKLIEDLEEKIRRLNERLKRLVEEIKERDR

SEQ ID NO: 20549 - protein, 56 aa, Artificial Sequence
  Synthetic
SERERVREEVRKLLERLRELLERHRRKLEKLNRELEKVLEDHRRTLERLKEELERS

SEQ ID NO: 20550 - protein, 56 aa, Artificial Sequence
  Synthetic
IDTVLEEARKLIEKAERDIRRLAKENEKTIEEVKERLKKLMEENKRLIEEIKERTR

SEQ ID NO: 20551 - protein, 60 aa, Artificial Sequence
  Synthetic
SEIEDLLRRLKEVADEIKERLKKLSEESEELVRRVKRRIEELNKENREVMKEIKRRIDSG

SEQ ID NO: 20552 - protein, 59 aa, Artificial Sequence
  Synthetic
EEDVRRLAEDIRRLLEEIEKLLKEHEEKNRKLKKELEDLVRRHRKSVEDLKREIRERSR

SEQ ID NO: 20553 - protein, 56 aa, Artificial Sequence
  Synthetic
DDEERLEETLERLERELKKIADEHRRRNEELRDTLRRIAEELRKTHKDLLERLEEE

SEQ ID NO: 20554 - protein, 59 aa, Artificial Sequence
  Synthetic
KRVVEEVERKLRRLMDRIREELKRLTDESEDLVTKILDTVRRIVESIKKLVDELREERK

SEQ ID NO: 20555 - protein, 60 aa, Artificial Sequence
  Synthetic
DEAERLLERVDKAHERSEELLDRVLKENRKVLEEIRKLADDLRKLLDDIMRRIEDLVRKE

SEQ ID NO: 20556 - protein, 59 aa, Artificial Sequence
  Synthetic
DRDLREIERRLKEIEEENRKLVKRLEDENRKIAREVEKLVERLERRLREIARRVEESVR

SEQ ID NO: 20557 - protein, 56 aa, Artificial Sequence
  Synthetic
REKEELKKSIERVKRELERLLEEHRKRSEELKRRLEELLKDHKRRTDEVLKEAKDK

SEQ ID NO: 20558 - protein, 56 aa, Artificial Sequence
  Synthetic
VDTLEEEIKDIIRDVKRAVKESLEEDDRLAKEVEDMVRKSKEEVERLIEKVKRDTD

SEQ ID NO: 20559 - protein, 56 aa, Artificial Sequence
  Synthetic
REKEELEKEIERIKREIKKMLDELKRHSEELKRRAERLLEEHRRETERIIREMRES

SEQ ID NO: 20560 - protein, 56 aa, Artificial Sequence
  Synthetic
VKTLLEEIRKILKEVEDRIREILREDKRLADELEKAVRDSLREVKRILDEVREAVR

SEQ ID NO: 20561 - protein, 56 aa, Artificial Sequence
  Synthetic
DEDKRLADEIKRVLDELKKSVKEHRDHSEELLRRAKELLKRHEDETRKIEEEARRN

SEQ ID NO: 20562 - protein, 56 aa, Artificial Sequence
  Synthetic
VETLKREIEELIRRAKKVNKESKEDDRRLADEVRKVVERSEETVKRLRDEVTERVR

SEQ ID NO: 20563 - protein, 56 aa, Artificial Sequence
  Synthetic
REKEELEKELRRIKRELEKILEEVRKRSKELLDRLRELLRRHEAETEKAIEEMERA

SEQ ID NO: 20564 - protein, 56 aa, Artificial Sequence
  Synthetic
VDKLLRDVREIAREAKRVIRRILKTDEDLARELEEIVRRSLKKVEDLIRKVKEDAR

SEQ ID NO: 20565 - protein, 60 aa, Artificial Sequence
  Synthetic
SEEEKLEEIIRRSRKRLKELIDRLRELVKKIDDDLKRLLDEHRRRLEESERRAEELLKKV

SEQ ID NO: 20566 - protein, 56 aa, Artificial Sequence
  Synthetic
VEKVLKELEESSRRVVELIKKLMRELEKLLRDVEERAKDLLRKNTRSSEELEKRIE

SEQ ID NO: 20567 - protein, 60 aa, Artificial Sequence
  Synthetic
SEEEKLKKLLDESEKRLREILKRHEEIVRDIKRRLEELLKRHKELLDRSLKRLEELLKEN

SEQ ID NO: 20568 - protein, 56 aa, Artificial Sequence
  Synthetic
VEELLERVKKSSEDVAREIRKLARDNERLLEEVKRLIRKLLEENRESSKDVEDKIR

SEQ ID NO: 20569 - protein, 60 aa, Artificial Sequence
  Synthetic
SKEEELRDKLRKIRKRLEELLERLAREIDRIRRALEDLLRRHKEELDRSRKRAEELLKEI

SEQ ID NO: 20570 - protein, 56 aa, Artificial Sequence
  Synthetic
VDRVLEELDRLLKEVEETIRDLARKLRELLKRVEDTLRKLLKENKDSSRRLEEEIR

SEQ ID NO: 20571 - protein, 60 aa, Artificial Sequence
  Synthetic
SKEEELARMIEESVKRLKKLLDDLRKVIKESKDRLKELIDDHRRILEEIRRELEELLKKK

SEQ ID NO: 20572 - protein, 56 aa, Artificial Sequence
  Synthetic
VDKLLKEIEDSSRKLAEEIKKLIDEIRESSKEVIERVRRLLERNKELVRKVKEEIR

SEQ ID NO: 20573 - protein, 60 aa, Artificial Sequence
  Synthetic
SEVEKLEEEIKKINDEIRRLSDKNLEDLKRILEEIEDLSRRNLKKTKDILREIEEEAKRR

SEQ ID NO: 20574 - protein, 59 aa, Artificial Sequence
  Synthetic
DEFAERLKRSLEDSKRTSKELVDENRKLNEELERTVRKLIEDNKRLNDRVEKRVKELAD

SEQ ID NO: 20575 - protein, 58 aa, Artificial Sequence
  Synthetic
SLEDEIRRLIEEIKRKLKELLERLKEEIDRIREELKKSNRKLDELSRRIEEEARKRVG

SEQ ID NO: 20576 - protein, 59 aa, Artificial Sequence
  Synthetic
EEKIERVLREMEKLLRELERIAREVLKEIEKILRENKKHNEEVMERNKRLAKELKEKAD

SEQ ID NO: 20577 - protein, 58 aa, Artificial Sequence
  Synthetic
DLEREIDELIKDIARRLEESNRELEKLVRRIEEELRRSNKELEDLSRRIKTELRKEVG

SEQ ID NO: 20578 - protein, 59 aa, Artificial Sequence
  Synthetic
EEKAKRVADEIRKILRENEEHNEEVARRIEEILRRNKKHNKEVADKNRELLKKLKEEAR

SEQ ID NO: 20579 - protein, 56 aa, Artificial Sequence
  Synthetic
KLVEEIRKSAEDNRRRLEKLVRESKKSLDDNERENRKLVDELRKIATKIKEDLERD

SEQ ID NO: 20580 - protein, 59 aa, Artificial Sequence
  Synthetic
KEAVDKLEEENKRDHDEYKKVVDELKKENKEDHERSRKLAEDLKRLLEDIRRRIKETRR

SEQ ID NO: 20581 - protein, 59 aa, Artificial Sequence
  Synthetic
DEVEKLIEDLKEVTKKHAKRVEETNRHNEDVLRKVAKEVKRILDDVKRVVDEVKKVVDA

SEQ ID NO: 20582 - protein, 59 aa, Artificial Sequence
  Synthetic
DKAKKKLEDVLKRSREEIERLKDDSRKSVDETRERLKKLKEDLKRLLEEVRKEVEKLKR

SEQ ID NO: 20583 - protein, 59 aa, Artificial Sequence
  Synthetic
SEVEKLIKELRDVLKKVAEDVEKTNRDLEEVSKRSAEKVKKLEDELEKVLREVEELVKN

SEQ ID NO: 20584 - protein, 59 aa, Artificial Sequence
  Synthetic
RKAEEDLRKVLTEIRKRAEELRRESDESVKRSRKELERLLREIEKRVEEIEDRARKAKK

SEQ ID NO: 20585 - protein, 56 aa, Artificial Sequence
  Synthetic
EEVERIIEEIRDEVKKAAEKVEKVLKESREISKRAEDEVRRVLDEIRKLDETLRDA

SEQ ID NO: 20586 - protein, 56 aa, Artificial Sequence
  Synthetic
REKLRKVLDEIRREIERLKERLDRLDEESDRKSEKLKEDLERLLREIEKRIRDERR

SEQ ID NO: 20587 - protein, 56 aa, Artificial Sequence
  Synthetic
DEVRKVLEEIKELLKRLAEKVKKLIKESREISKRAAEKVKRLIEKSRRLLDTLEKA

SEQ ID NO: 20588 - protein, 56 aa, Artificial Sequence
  Synthetic
KDTLKTVLDTIKKKIEELVKELREVDEESKKRSKELKEEMDKVDEDIKRAIERRTR

SEQ ID NO: 20589 - protein, 56 aa, Artificial Sequence
  Synthetic
DEVRKVLEDIKRDLDRLAKRVKDVLREIEELTKEAARTVKKVIEESRRLLRKLKEA

SEQ ID NO: 20590 - protein, 56 aa, Artificial Sequence
  Synthetic
REDLTELLKRIEEKIKRLVEELERLLKRSREESKRLVEEMEKVNREIEEEIKKRAT

SEQ ID NO: 20591 - protein, 60 aa, Artificial Sequence
  Synthetic
EEVERLLKEIKDLLDEVARENKEALKRSKELLEEVAEDNKRVLREIEKLLEDVERKVKDE

SEQ ID NO: 20592 - protein, 59 aa, Artificial Sequence
  Synthetic
KELLKELEDLLRKARKTVEDLDRELEELNEEIRKALEELDKELERLVREIRKRLEDARR

SEQ ID NO: 20593 - protein, 60 aa, Artificial Sequence
  Synthetic
REAEELLKEIERLLREVERENKKALEDSRRLLEEVAEEVKKVLREIEELLKTLEELVRKE

SEQ ID NO: 20594 - protein, 59 aa, Artificial Sequence
  Synthetic
EELLRELKRLLEEIERRVRELDEELRKLNEDIKRELERLIRELEELLKRAEETLRRLKD

SEQ ID NO: 20595 - protein, 60 aa, Artificial Sequence
  Synthetic
SEVEDALRRLKELLRRVAEENRKVLEESKKLVEDARRKNEEVLKEIEKLLEDVAREVKDR

SEQ ID NO: 20596 - protein, 59 aa, Artificial Sequence
  Synthetic
EELLRELKKLLEEIKKSVEDLDRELKKLNDEIRDESRKSKEELERLLEDIERALRELAR

SEQ ID NO: 20597 - protein, 60 aa, Artificial Sequence
  Synthetic
SEAEEVLRRIEELVERATRTVEKLAEESKRLLEKLAEENKRVLEEIKRLLDEVADKVRKK

SEQ ID NO: 20598 - protein, 59 aa, Artificial Sequence
  Synthetic
KELLDELKTLLDEITKRLKDLTDKLERLNDKIRRELERLDEELRELLERIREEMEKLTR

SEQ ID NO: 20599 - protein, 60 aa, Artificial Sequence
  Synthetic
DLEEELKELLERIRKAHEELIKELEDLTEKIERDHEKLIKRLEDLLKRIEDEMRKLLEEI

SEQ ID NO: 20600 - protein, 59 aa, Artificial Sequence
  Synthetic
SRTVKEILKRIEDSLRRAAKKVKDLAEENKDSLRRVAEKVERILEELKRLLEEIARRVK

SEQ ID NO: 20601 - protein, 60 aa, Artificial Sequence
  Synthetic
SLEEKLEDLIRRLKESNERLKRELERLIEELRKNNERLLKELDDLVEEIERALRDLLREK

SEQ ID NO: 20602 - protein, 59 aa, Artificial Sequence
  Synthetic
SRKVEKILKDAKDSNKKVADTVREILKRARDSNKRVAERVKDLLRRLRELLKELAERVK

SEQ ID NO: 20603 - protein, 60 aa, Artificial Sequence
  Synthetic
DLEEELKELIKRIRDAHRELKERLDKLVEEIKRNNEKLSDDVRRLVREIEKELRRLLEEI

SEQ ID NO: 20604 - protein, 59 aa, Artificial Sequence
  Synthetic
KEKVKKLLKELEESLKRVADEVKRLLEELERSNREVEKRVRELLEEARRLLKDLADKVR

SEQ ID NO: 20605 - protein, 60 aa, Artificial Sequence
  Synthetic
DLERELRELIKRIEDDIRKNVKRNEESIRKTEDELRKNVRENERLIEEMRKELEKLRRRN

SEQ ID NO: 20606 - protein, 59 aa, Artificial Sequence
  Synthetic
EEVARKLLDELREIKKRINDTSRTTLEDNKRLAKEIHDSSKESLKRLKKILDDIREEAR

SEQ ID NO: 20607 - protein, 60 aa, Artificial Sequence
  Synthetic
RLAEELRKLIDKVRRDLDRNRETNRELIKRAKDELRKNEEENRRIIDEIRRALEDLTRKN

SEQ ID NO: 20608 - protein, 59 aa, Artificial Sequence
  Synthetic
EEAVRKVKKEIEDIVREIHKLSKRTLEELERIVEKIHEDSKRMLERVKKLLDKIRRDAE

SEQ ID NO: 20609 - protein, 60 aa, Artificial Sequence
  Synthetic
SLAEELRKLIKRVEDEIRRLAEENKDLIRKARETIRKNEETNREVITRIRREIEKLEKDN

SEQ ID NO: 20610 - protein, 59 aa, Artificial Sequence
  Synthetic
EEVVRELLKEIRKVLEDIRRESKTSLDDIRRLLKEINDLSEETIREAEELLDRIRKKAT

SEQ ID NO: 20611 - protein, 60 aa, Artificial Sequence
  Synthetic
SLREELKRLIDESRKSLRENEERNKKSIDDTRRLLRENERRNRETIKELKKTLDELRRRS

SEQ ID NO: 20612 - protein, 59 aa, Artificial Sequence
  Synthetic
KEAVDRLLERIRRINEEINRTSEKTLEENDRLVKELHERSERLLRKLEELLRKIDETIR

SEQ ID NO: 20613 - protein, 60 aa, Artificial Sequence
  Synthetic
SLAEELRRLIEEVKKRLKELEDRNRKLIKEARDELKENEETNRKTIEDIERTLEKLERDN

SEQ ID NO: 20614 - protein, 59 aa, Artificial Sequence
  Synthetic
EEAVRDLLRRIRELLRDLERLSEESLRKLKEIVEDIHRKSKTMLDKLRKMLEELRREAT

SEQ ID NO: 20615 - protein, 60 aa, Artificial Sequence
  Synthetic
SLAEELKRLIEESRKSVEELERRNRKLIEDARRDLERLARENRKLIEEIRRRLKDLAKDN

SEQ ID NO: 20616 - protein, 59 aa, Artificial Sequence
  Synthetic
EEVVRRLLEEIKRLNDEAKRKSKESLDRLREILKEIRKTSERTLEKLKRILDRIREEAT

SEQ ID NO: 20617 - protein, 60 aa, Artificial Sequence
  Synthetic
SEIEELLERIRDLMRRINKKSEDHLRELEKILREIRRLAEKSNEEIERLLRELEDLAEKR

SEQ ID NO: 20618 - protein, 60 aa, Artificial Sequence
  Synthetic
MKDLKKTLDDLLDELRKDIERNVKENRDTLKRIEDDIRRLAEENKKLLEEVRKKIEELET

SEQ ID NO: 20619 - protein, 60 aa, Artificial Sequence
  Synthetic
SEIEELLRRLEDILRRIEELIRKVLKELRDLVEKSNDLSRRHLEDAKRILKEIEEEVKRR

SEQ ID NO: 20620 - protein, 60 aa, Artificial Sequence
  Synthetic
VEELRRRLRKILEDIRKRIEELVEELRRLLKEWEEESKKNDETNREVLKRIEDRIRELER

SEQ ID NO: 20621 - protein, 60 aa, Artificial Sequence
  Synthetic
DEAEEIKERIKKVVEDLERKVRELLRRSEKLAEDLHELSKENIERMKRLLEELEDLVRKR

SEQ ID NO: 20622 - protein, 55 aa, Artificial Sequence
  Synthetic
EEIEDLLRKVEERIRELEEELRRLNKKIEEEVRRNKDENRRVNEEIERRIRELAR

SEQ ID NO: 20623 - protein, 60 aa, Artificial Sequence
  Synthetic
DESKEILDRIRKVNEDLRRLAEELLKDSRRVVEEAHKLSEDNIRRLEELLKEIEKEVRRR

SEQ ID NO: 20624 - protein, 55 aa, Artificial Sequence
  Synthetic
DKIRKLLEDSKKTSDELKEELDRLNEEIERSVRDNKRRNEEVNKRIEDEIRKLAT

SEQ ID NO: 20625 - protein, 60 aa, Artificial Sequence
  Synthetic
SEAETILEKIRRANEELNRLSEENIRKSRKVVKELHELSKENIKRARDLLREVKKLVEKR

SEQ ID NO: 20626 - protein, 55 aa, Artificial Sequence
  Synthetic
ESIKELLKEVEDDVRKNKEENKKVNKEAEDEVRENKERNTRVNKEMEEEIKRLAK

SEQ ID NO: 20627 - protein, 61 aa, Artificial Sequence
  Synthetic
SERERLERLVREAAKELKRLLEELERLHKKIDEDLKRSNDRLRELHERIKKDIERLLRRIG

SEQ ID NO: 20628 - protein, 56 aa, Artificial Sequence
  Synthetic
VEEILKEIEDILRKVKEDVKRVLDENRRVLEENKEHAERILRENKRMLEELRREAK

SEQ ID NO: 20629 - protein, 61 aa, Artificial Sequence
  Synthetic
DSEERLRKLMREAREELKELLRRLRELHEEIRKRVEELLRRLEELSDKLRRDLERLLREIG

SEQ ID NO: 20630 - protein, 56 aa, Artificial Sequence
  Synthetic
VEELLKTIKELVDRLRRIVEKVLDENRRLLKRLEEEIKRVLDENREMLDRLRKAAE

SEQ ID NO: 20631 - protein, 61 aa, Artificial Sequence
  Synthetic
SKEETLEKLVREVKDRLKKLLEEVRRLTEELERELKKLREELEELSKELEKDLRRLKKRVG

SEQ ID NO: 20632 - protein, 56 aa, Artificial Sequence
  Synthetic
VEELLKRIKELLEELERRVEEVLRRNRELLKRLEETIRKVLEENKKLLKEVREDAK

SEQ ID NO: 20633 - protein, 61 aa, Artificial Sequence
  Synthetic
DKEEELRRLVEEVEKRLRELEKELEDLTDKIEKRLRESNERIKKLSDDIRRRLEDLLRKVG

SEQ ID NO: 20634 - protein, 56 aa, Artificial Sequence
  Synthetic
VEELLKRIRDILKRVEEIVKEVLERNRKVLEDNERHAEEVLRRNKRLLEELEKRAT

SEQ ID NO: 20635 - protein, 61 aa, Artificial Sequence
  Synthetic
SKEDDLRKIVKEIEEEVRKLLKELEELTKELEDRLRESNKTLKELNERIKRRLEELLRRIG

SEQ ID NO: 20636 - protein, 56 aa, Artificial Sequence
  Synthetic
VEEVKKELEDLLRRLREEVKRVLDDHRRILKENEDHAREVLKRNKELLRKLEEEAK

SEQ ID NO: 20637 - protein, 61 aa, Artificial Sequence
  Synthetic
SKEERLKKLVDDVRKTAEKLKRDLERLTKEAEETLERLKRELDRLNREIAEEIKKILDRVS

SEQ ID NO: 20638 - protein, 56 aa, Artificial Sequence
  Synthetic
VETLLEEIERKLREVEKRIREVLKRHRELLRRLRETIKRVLERNKELLDRLREAAR

SEQ ID NO: 20639 - protein, 61 aa, Artificial Sequence
  Synthetic
SKEETLKKLMDRAEEELRRLKRELEELNDRIREALKKLNEDLRRLHEKIKEDIRKLLEEVD

SEQ ID NO: 20640 - protein, 56 aa, Artificial Sequence
  Synthetic
VEELLETIERILEEVRRRIEKVLEENKRLLDENKKHAEESLKKNKELLKRLRDAVK

SEQ ID NO: 20641 - protein, 59 aa, Artificial Sequence
  Synthetic
SEVDEVRERLERLLRTVERVVERILRELKRLNDELRKIAEDLLRENKDLLRELAERVRK

SEQ ID NO: 20642 - protein, 59 aa, Artificial Sequence
  Synthetic
SEALKDIEKLVRKIKEELKRLLKEVAETLERSERSLDKLIEDHRRLVEDIERALKELRK

SEQ ID NO: 20643 - protein, 60 aa, Artificial Sequence
  Synthetic
SEVEKVLETIKDLLRKLEEIVKKILDEDRKLMEKVTKIVEDLLEENKRLLEELERLAREG

SEQ ID NO: 20644 - protein, 59 aa, Artificial Sequence
  Synthetic
SELLKRIRELVKEVKDRLRRLREELEESVRRARKTLEDLERRHRKLLKDIRETIKELIR

SEQ ID NO: 20645 - protein, 55 aa, Artificial Sequence
  Synthetic
DLDREIERLVEELERRLRELLRRNEELVKRVEDELEKLKRESEKLLRELRKKLEE

SEQ ID NO: 20646 - protein, 59 aa, Artificial Sequence
  Synthetic
KEAVDKLLKELKDILKKLEELSRKSMEDIKDILRRYEKLVKELLDELKKILDELDRADK

SEQ ID NO: 20647 - protein, 55 aa, Artificial Sequence
  Synthetic
DLKDEIEELVKRARERLERLREESEEIVKELEKVLRDLEKENRDLARRLRDELRK

SEQ ID NO: 20648 - protein, 59 aa, Artificial Sequence
  Synthetic
EEAVRRLKDELRRILEEYERVVEELKKRLKDLLREAERLSKESLDELKRILRKLKEDAK

SEQ ID NO: 20649 - protein, 60 aa, Artificial Sequence
  Synthetic
SLEDELRRLVEEDERNIRKLNDENRKSVRKLEELLRRLNKRNRETIERIKRLLDRLREES

SEQ ID NO: 20650 - protein, 59 aa, Artificial Sequence
  Synthetic
KEEIDRILRKVERLSRKAHEDVRRINEELEKLLEKLKREVKRENDRVEEEAKRLADEVK

SEQ ID NO: 20651 - protein, 60 aa, Artificial Sequence
  Synthetic
REVDELVKRIEELLREMKKKNDESLKDSRDLLRELEKRVERVIEEIEKLLRDLEELVRKE

SEQ ID NO: 20652 - protein, 56 aa, Artificial Sequence
  Synthetic
EKRLKKLLDELRDMSRKADRALRELNKDVARKIEELRRRLKKLLDEVKERADELTK

SEQ ID NO: 20653 - protein, 60 aa, Artificial Sequence
  Synthetic
SEAEKLLEDLKRLVEDLRRKNKKLNDDNERLTTELEKTSRKLLEELKRLLEKVADDVRRT

SEQ ID NO: 20654 - protein, 58 aa, Artificial Sequence
  Synthetic
ELKERLDRLLEEVKKTIRELEKRNRESHKRTKDVARRSAEETKRVLEKIEDDLRKLDK

SEQ ID NO: 20655 - protein, 60 aa, Artificial Sequence
  Synthetic
SEAEKLLKEIKDLVDELRKRSKELIDENKRLTEEVEERARRLLTELRKLLKRLEELVRRE

SEQ ID NO: 20656 - protein, 58 aa, Artificial Sequence
  Synthetic
ELEERIRRLLREIEKEAKRSRDRSREVHRRTDEELRRLEREIKEILKEIKRKLDELRR

SEQ ID NO: 20657 - protein, 59 aa, Artificial Sequence
  Synthetic
SDVDRLLKENRDVSKKVEDDVRRLLEELKRISEEIARRVKRLLEELRRILREIEELVKK

SEQ ID NO: 20658 - protein, 59 aa, Artificial Sequence
  Synthetic
DELRRRAEKSIEDNERKLRKLEEDAKRIIDDNERILRDLERRAKDVIREVRKALEDLKR

SEQ ID NO: 20659 - protein, 60 aa, Artificial Sequence
  Synthetic
DEAEKLLEEVKEENRRVNEDIKRVIEEIKKLIDESRRLMEKIIRDVEALLTRIRDVVEKL

SEQ ID NO: 20660 - protein, 59 aa, Artificial Sequence
  Synthetic
EDVRREIERIMRELKKNLDRLEEEIRRIADELRRVNTRLEEEIKRVIDEARKTLEELRR

SEQ ID NO: 20661 - protein, 60 aa, Artificial Sequence
  Synthetic
SKEERLEEILRRHKKSLDEIRKELRKLLEDHRKSIEDLIRKLRELLERLKELLERLERSG

SEQ ID NO: 20662 - protein, 56 aa, Artificial Sequence
  Synthetic
VDRLITEIKRINEELRESVRRLLERAKRIDEELRRTAEELVKTIEKLAKELEETVR

SEQ ID NO: 20663 - protein, 61 aa, Artificial Sequence
  Synthetic
DEIEEVVERIRRIDKELNKRAEEVIRRNKELDERLNREIERVKEEIRRLIKRLEEVTRRDL

SEQ ID NO: 20664 - protein, 59 aa, Artificial Sequence
  Synthetic
EEAKKKLEDLLEEHERNLRKIERDLEELNERHERNLRKLKRELEEILKRAKEVLDELRK

SEQ ID NO: 20665 - protein, 61 aa, Artificial Sequence
  Synthetic
SEIEKVLREIEEIDKRLNKEVEDVLRENRRVDEELNRHSERVREEIERLVKRLDDVAREEL

SEQ ID NO: 20666 - protein, 59 aa, Artificial Sequence
  Synthetic
EEMKKTLEKLLREHEENIKELKRRLEELNEEHERNIRRSEETLKKLLKEAEDRLREIKK

SEQ ID NO: 20667 - protein, 60 aa, Artificial Sequence
  Synthetic
EEAERVLKRIADLIEELKRHSEEVSRRSKKLLDDLSRHTEKVSKESEDLLRRLEELARRG

SEQ ID NO: 20668 - protein, 59 aa, Artificial Sequence
  Synthetic
REIEERLRTLRRRLERMVEEIERLNEENLRRVEKRVRELEKENEDNLREAKKLLDEIRR

SEQ ID NO: 20669 - protein, 60 aa, Artificial Sequence
  Synthetic
SEVEEVLKDIERLIKELREENKRSLDRSRRLAEDLERRNRESLRRIEKLLRELEKIARDL

SEQ ID NO: 20670 - protein, 59 aa, Artificial Sequence
  Synthetic
EEVRKRAEDVLRRLEEVIKELEKTNEDAKRELKRLIDELRRTNEEVNKRLEERLDKIRE

SEQ ID NO: 20671 - protein, 60 aa, Artificial Sequence
  Synthetic
SEVERVLKDIERLLKELEERNRRSLEESAKSTRKVEEDNKRSLDKSTELLKRLEEDAKDD

SEQ ID NO: 20672 - protein, 59 aa, Artificial Sequence
  Synthetic
EEVRKRAEDVRRRLEEILKRLKETNEDMKRENKRVLDELRKTNEDAEKKLRDLIRKLRE

SEQ ID NO: 20673 - protein, 60 aa, Artificial Sequence
  Synthetic
SEVEKVLKEIDELIKDVERTNRESLEESERLLEKLKRENERTVERSERLAEELERLAREL

SEQ ID NO: 20674 - protein, 59 aa, Artificial Sequence
  Synthetic
EEVKDRADKLLRRLEEMVEKIRRTNETLLRALEKLIRDLKRNNEEVEKRLREIAKKIRD

SEQ ID NO: 20675 - protein, 60 aa, Artificial Sequence
  Synthetic
SEVDELLKRLKKLLEDDKRLAEELLKTIEKVNDDTRKRSEELLRRLERALEELEKLVRKV

SEQ ID NO: 20676 - protein, 59 aa, Artificial Sequence
  Synthetic
EEVKRRLEEVLREIKRLVDETRKELRRIDEESKRLAEKSRRDSRRVEERLRTLLEELRK

SEQ ID NO: 20677 - protein, 60 aa, Artificial Sequence
  Synthetic
SEVEKLLEDMERLLKEDEELVRRLSKRSEEIVRDDRRRNKEILDEIRKLLEELKRLADRL

SEQ ID NO: 20678 - protein, 59 aa, Artificial Sequence
  Synthetic
KDVEERLRRAEERIRRAVERTRDHARRNHEKLKELVKETRESNDRLKKEIRKLLEELRK

SEQ ID NO: 20679 - protein, 60 aa, Artificial Sequence
  Synthetic
EEEERIREVKKRSEDLLEELKRSNERVERESDKLAEEIRRKLEELARRADEVIRRLRARK

SEQ ID NO: 20680 - protein, 56 aa, Artificial Sequence
  Synthetic
TEKLLEDLKRINKETERLNRELLRDLERINEETRERIDRLLRELERMIDELRKRVD

SEQ ID NO: 20681 - protein, 60 aa, Artificial Sequence
  Synthetic
SERERAEEIRKRSEDVVREMRESNKDVSRKSEELAKKLREDLKRVEKKVRELLEEIKREK

SEQ ID NO: 20682 - protein, 56 aa, Artificial Sequence
  Synthetic
TEELLKRLEEISRRSRELNRRLLEDLKRINKETKERADKLLEDLERLLEDIKRRVD

SEQ ID NO: 20683 - protein, 60 aa, Artificial Sequence
  Synthetic
DEDERLKEVEEESKKVADELRDRLRRLMEESRRRLKRLREEAEEIKRELDTIAEDLKREK

SEQ ID NO: 20684 - protein, 56 aa, Artificial Sequence
  Synthetic
TEEILRRLEEISEESERRVEKLLRENKEINEETDRRVKELLERLKEVLERIERRVK

SEQ ID NO: 20685 - protein, 60 aa, Artificial Sequence
  Synthetic
DERERLREVLERSRKLAEDLRRSNEELERRSRELAKELRKTNKELEKRLKDKADDLRREK

SEQ ID NO: 20686 - protein, 56 aa, Artificial Sequence
  Synthetic
TERLLEELERISEESKRRNDELLEKNERVNEETRRRNEELLDELRRLLEEVERRVK

SEQ ID NO: 20687 - protein, 59 aa, Artificial Sequence
  Synthetic
DIEERIREVLRKARRVLERSEERSRELVERLRRVLEDSRRRTKRLTEEAKELLDEVRKR

SEQ ID NO: 20688 - protein, 59 aa, Artificial Sequence
  Synthetic
KKLVEDLLREIEKIIKEIEDTTKRVVDELRRLLEEIKRTSDELEKEVRKLLEEIKRATD

SEQ ID NO: 20689 - protein, 60 aa, Artificial Sequence
  Synthetic
STREALKELIDRLRDLVRRIRDKHRKLLEEIKRVLDESERRHRELIKRVEELLRDLARRV

SEQ ID NO: 20690 - protein, 56 aa, Artificial Sequence
  Synthetic
VETIIRRAEEALKRLEDSSRKVEETIRKVLEDLRRSSEEVAERVRRVLERLEEKAQ

SEQ ID NO: 20691 - protein, 60 aa, Artificial Sequence
  Synthetic
SSEERLRKVIEDLKRLAEESRKRHKELIDELRKAVERIERRHKKLLDEIKKVVDDIRRRV

SEQ ID NO: 20692 - protein, 56 aa, Artificial Sequence
  Synthetic
VDTIIEEVKRVLEELKRSTEEVEKRVRDAIEELERSSEELARRIKEVLKRLEEETR

SEQ ID NO: 20693 - protein, 60 aa, Artificial Sequence
  Synthetic
SAEEKLDRLRKEVERLSDETRKELERILKKVEDVIRETRRRAKELEEELRRLIRDIEEKL

SEQ ID NO: 20694 - protein, 56 aa, Artificial Sequence
  Synthetic
IETVIREIERLLEEDRKAVEEILRRIEKLIEDDKRAVDRIVKEIKDILDKLREETR

SEQ ID NO: 20695 - protein, 60 aa, Artificial Sequence
  Synthetic
DIEDELRKLEEEIRRVIEKWKRLTEENRRENERVIRKWDKLSKDLADEIRRVIEDARRKL

SEQ ID NO: 20696 - protein, 59 aa, Artificial Sequence
  Synthetic
KELVKELVDRVKRLIREIEKEARRTSEENKDLLKKIEDDAKRSEDELRELIKEIKKRID

SEQ ID NO: 20697 - protein, 60 aa, Artificial Sequence
  Synthetic
DIEDTLRKLAEDIKKVERDMEESNRRNREKNREVIEKWKKLSDDLERELEEVIEDARRKL

SEQ ID NO: 20698 - protein, 59 aa, Artificial Sequence
  Synthetic
RELVRKLIEDVRRLIEEIRRENKESSDRNKRLVEEIDERAKRSADELKRLLKEIRDRID

SEQ ID NO: 20699 - protein, 60 aa, Artificial Sequence
  Synthetic
DIEEALDEVRKEIEEVIRRWKKLTRENEEENRKVIEDIRRRLDELRREIEKVIRDARRKL

SEQ ID NO: 20700 - protein, 59 aa, Artificial Sequence
  Synthetic
RELVKKLIDDIRKLIDEIRRDAERTSRDNKRLVEEIERTIEKLIREVKELLERIKEEID

SEQ ID NO: 20701 - protein, 60 aa, Artificial Sequence
  Synthetic
DIEEILKKVEDDAREVIKEMRKSNEDNKRKNKKVIEEIERTLKKIEDDARRVIDEIEKKL

SEQ ID NO: 20702 - protein, 59 aa, Artificial Sequence
  Synthetic
RELVKKLDDELKELIKKIRTDNKRSSERNDELVKEIRKRIEKLVREAKELLKRIREDID

SEQ ID NO: 20703 - protein, 60 aa, Artificial Sequence
  Synthetic
SIEETLDELRKKIEEVIRRMKKSNDDNEKENREVIDRIRRTNEEIRKRAERVIEDARRKL

SEQ ID NO: 20704 - protein, 59 aa, Artificial Sequence
  Synthetic
KERVDKLIREVEDLIRRIEEENKKSSEENKRLVRRIEKDNEDSIRELEKLIEDIRRTID

SEQ ID NO: 20705 - protein, 60 aa, Artificial Sequence
  Synthetic
SLEELLEKVKREIDKVLERIERIVRKNAKENERVIREDERLLRELVKEIKEVEDRIRKRG

SEQ ID NO: 20706 - protein, 58 aa, Artificial Sequence
  Synthetic
DLMRKLLEEVKELIKRLEEEIEKASREDRRLVEEAKEKSKELAKRIKEELKRIEDEVR

SEQ ID NO: 20707 - protein, 60 aa, Artificial Sequence
  Synthetic
DEVDDIIRKLKELIKELREKSKRISEENKRLVRRLEELSRRIIKEIKDLLEELKDRARKD

SEQ ID NO: 20708 - protein, 59 aa, Artificial Sequence
  Synthetic
EEVKDKLRRIKEEADKAIKDNEDLLRRNERENREAVKRNEELLKEVRREVEEVIRRTRK

SEQ ID NO: 20709 - protein, 60 aa, Artificial Sequence
  Synthetic
SEVEEVIKRIKKLNKETEDAVREVIKRIEDSNEKLLRDVEELIKKIEKALRDLEDKARRV

SEQ ID NO: 20710 - protein, 59 aa, Artificial Sequence
  Synthetic
REVEELLRRVKRHTEEVVRRVERELRRIAEHVKEVEKTVRELVRRIREKIREVVERVRK

SEQ ID NO: 20711 - protein, 60 aa, Artificial Sequence
  Synthetic
DEARELVKELEDLIREITKTVRRLLEESEELIKRIDDAVDDLRRRDEDLNREIKEEIEKR

SEQ ID NO: 20712 - protein, 56 aa, Artificial Sequence
  Synthetic
ERILRELEERVKELEKEAREILKRSEDETDKLREKAERILEDLERKNRRTMDEARR

SEQ ID NO: 20713 - protein, 60 aa, Artificial Sequence
  Synthetic
SEVEELVERVKRLIDEIRKRVTDSVEESKRLIKEIKEEVDRLAEEDKRLNERIKETIRRR

SEQ ID NO: 20714 - protein, 56 aa, Artificial Sequence
  Synthetic
ERIVKKLEEEIRKIIKEIRELNKRSEDETKKIVDEARKILEDLRRENEDTKRKITE

SEQ ID NO: 20715 - protein, 60 aa, Artificial Sequence
  Synthetic
SEVEDLAKRIEDLIRRILRENERSLEESKRLIDEIRKRIEDLLRRSKELIDRIREEVRER

SEQ ID NO: 20716 - protein, 56 aa, Artificial Sequence
  Synthetic
KRILDELRKAVKKLEDDSRRLNRESEERTKKLKKELDELLKKSKDETKKLVEDLRT

SEQ ID NO: 20717 - protein, 57 aa, Artificial Sequence
  Synthetic
SEVEKLLRELEDVIRRLREDVKRIVEEDERLNKRLNDELRRLSEKNDRLNDRIRREV

SEQ ID NO: 20718 - protein, 56 aa, Artificial Sequence
  Synthetic
KEKVKRLRELVKKVIEDMERILRRLEKANRESAERAKDVLRRNHKKDEDSKRELER

SEQ ID NO: 20719 - protein, 57 aa, Artificial Sequence
  Synthetic
DRVREIVERVERVIRDILRTVEKLSEENKDLNRRLTEKIRDLERRDRELNKRLRDEV

SEQ ID NO: 20720 - protein, 56 aa, Artificial Sequence
  Synthetic
KEIVEDLRRKVEKVKRDAEKLLEDNHRRDRRNLREIEKIVEELKRRNEKTLRDLTK

SEQ ID NO: 20721 - protein, 57 aa, Artificial Sequence
  Synthetic
SEVEKLEEEVKEVIERLLRTVRDLSRRNEELNKRLTEDNERILKEDEDLNEELERRV

SEQ ID NO: 20722 - protein, 56 aa, Artificial Sequence
  Synthetic
KDVLRKLKKEAEDAIKEAEDILRENHEKDKKNKEDSEKLLRDLERRNEETLRRLRK

SEQ ID NO: 20723 - protein, 59 aa, Artificial Sequence
  Synthetic
RIEEILETLREELRTVLKKSKEILDELRKENKESIDRSKEILDRLRDEIRRILREIREK

SEQ ID NO: 20724 - protein, 59 aa, Artificial Sequence
  Synthetic
DEELKRAADKVKKLIKELDEENKKARDDDKRLNKKLNKDNDDLRREVEELLKRLRDEAE

SEQ ID NO: 20725 - protein, 60 aa, Artificial Sequence
  Synthetic
RIEDLVRDNKRKNDENTKRHERIVERLEEELRELVKRHEEDVRRLRKELEDLKRDAERKG

SEQ ID NO: 20726 - protein, 59 aa, Artificial Sequence
  Synthetic
DKKVEDLDRDNERLNRELTRHLEDLVRRVKELLRRMEEHLRELAERVKKLLDELRKEAT

SEQ ID NO: 20727 - protein, 60 aa, Artificial Sequence
  Synthetic
SDVEELAERVRRLSEEHAELVKRIVETSKRLNDDLRRMVKEIADRVRRLLEDIERKVRED

SEQ ID NO: 20728 - protein, 59 aa, Artificial Sequence
  Synthetic
EDVRKIIEDLRRHLEENRERVERIIRELRRLTEKTKKELEDIARELEKLVDELREEVRR

SEQ ID NO: 20729 - protein, 60 aa, Artificial Sequence
  Synthetic
SEVEKAEEDIRRLLKEVKDMDKKIVDDDERLNRELERTVRELAKEIEKLIRDLEERVRKE

SEQ ID NO: 20730 - protein, 59 aa, Artificial Sequence
  Synthetic
KDVKKIIKELEEELEKIAKESEESIKRLRKENRDSEERLRKILEKLKKDLEDVKRELER

SEQ ID NO: 20731 - protein, 60 aa, Artificial Sequence
  Synthetic
SDVEDVVRKIRELIRENLKRSKEIADENRRLNTENRERSKTLEEEVRRLLEEVKERAERL

SEQ ID NO: 20732 - protein, 59 aa, Artificial Sequence
  Synthetic
EEVRRILEKLRDDLRKLNETNRRIIKELRERNEKSNRDNRKILEELKDRLKKLEDELRR

SEQ ID NO: 20733 - protein, 56 aa, Artificial Sequence
  Synthetic
DEVDEVDKRSKETLKKIEDDARRVLEEYERTLEKIKRDVDRVLKESEETVRKLRAD

SEQ ID NO: 20734 - protein, 60 aa, Artificial Sequence
  Synthetic
EKELEDLVRELEEINKRLEEELRKLVEELRRHLEELRDELRKLVEELRKINEELEDRLTK

SEQ ID NO: 20735 - protein, 59 aa, Artificial Sequence
  Synthetic
SEMEDLKRVSDEVKKELEDLNRKSAKVSKEVEEEAKRLNRESREVVRRLKEELEKLERD

SEQ ID NO: 20736 - protein, 62 aa, Artificial Sequence
  Synthetic
KEVADELKKILDTHRKVDKEAKDRSEKLVRDHREVDKDVKRESDEILKRAKDTLDEIRERLR

SEQ ID NO: 20737 - protein, 60 aa, Artificial Sequence
  Synthetic
SELEKILKEIEEELKRVKERLERLHREHERLLRDVTRKLRKLLRDHREVLERVREELRRR

SEQ ID NO: 20738 - protein, 56 aa, Artificial Sequence
  Synthetic
REDLERTLRRIKEEVRKVERKAKEVLRETREKLKRLLERAREVLDENKKRLDDVAT

SEQ ID NO: 20739 - protein, 60 aa, Artificial Sequence
  Synthetic
SLEDIRRRLRELVRRLEEELRRSHEELERLVRDLERRLRESLRKLEELVDRLKKEIEKRG

SEQ ID NO: 20740 - protein, 59 aa, Artificial Sequence
  Synthetic
DDTARRLLEEAKKELDRIKEENERALRKIKDVIRKIDEESKRLNKEVADLVKKIEDRIR

SEQ ID NO: 20741 - protein, 58 aa, Artificial Sequence
  Synthetic
DLEDIVREIEKLLRDLERKAREIHERDERLARDLERKHRDIIREIERLLDELRERVER

SEQ ID NO: 20742 - protein, 59 aa, Artificial Sequence
  Synthetic
RKKVEEELERVRRIIKELERRLRELHKENKKLLDEILEESKRLAEEVRKTIEDIKRKIK

SEQ ID NO: 20743 - protein, 60 aa, Artificial Sequence
  Synthetic
SEVEDLLRRDRELNREHKRLLEEASKKNKEELERVLEKVKELLERVKKRLDEAKEALERG

SEQ ID NO: 20744 - protein, 59 aa, Artificial Sequence
  Synthetic
ERLERVLRESRKLNKESHETLKELIDRNRKLNKELEEAVKKIEEEIKKLLKELKEEKDR

SEQ ID NO: 20745 - protein, 60 aa, Artificial Sequence
  Synthetic
SEVEKLLREDRELNKRHVEKVRELSERNKELLERHEEKLKKVAKEIEDRLRRLEEMLRRG

SEQ ID NO: 20746 - protein, 59 aa, Artificial Sequence
  Synthetic
DRLKRVEEESEELNKRSHETLRRLVEENKKRNKELHERVERIKRRLEKLLRELEEEIRK

SEQ ID NO: 20747 - protein, 60 aa, Artificial Sequence
  Synthetic
SEVEELLDEDRKLNEELTKSAKRLTDENKKLLEDMKRKAEELKKRVDELLKEVTDVLRRG

SEQ ID NO: 20748 - protein, 59 aa, Artificial Sequence
  Synthetic
DRLERVLRESRKLNEDSKKRLEELIKENKDDNDRLREDLERIVRELEKRLDKLRKDTET

SEQ ID NO: 20749 - protein, 61 aa, Artificial Sequence
  Synthetic
KELEDLLRRIKRLIDENRRLSKEVLEEVRKLSEKHKKEVEDILKEIKELIEEALRRIERDG

SEQ ID NO: 20750 - protein, 60 aa, Artificial Sequence
  Synthetic
KERLDRILKTLRELLRKLREDNERIRREIREIVKRNSDELARIEEELRKLLDDLAKKAEE

SEQ ID NO: 20751 - protein, 61 aa, Artificial Sequence
  Synthetic
KELEDVLKEVEELSRRHKRRAERVSEENRKLLRRLKEEARKILEDIRRLLKKLEERVRRDG

SEQ ID NO: 20752 - protein, 60 aa, Artificial Sequence
  Synthetic
RERLKRILDEIRRIVEKNKRDLERLLRENEELNKRLREELRRILEEIEELLRELEERLRK

SEQ ID NO: 20753 - protein, 59 aa, Artificial Sequence
  Synthetic
SEAEEALKELKETSDRHKEDLDRLHEEDRRTNEEVEKELRKLVDEAKKKLDRVREIVEE

SEQ ID NO: 20754 - protein, 56 aa, Artificial Sequence
  Synthetic
EELLRRLEEIVRDNKRRVEEILERNRRLNEESEKKVRDIIKKLRDDLERLARELEK

SEQ ID NO: 20755 - protein, 59 aa, Artificial Sequence
  Synthetic
SEAEEALKELKRTSDEHRKRLEDLHRRDKKLNDDSKRRLDELLKRDEDTNRTVLDIARQ

SEQ ID NO: 20756 - protein, 56 aa, Artificial Sequence
  Synthetic
EELLRTLEKIVEDNAREVTEIIKKNRKLNDDSRREHERINDESRRLNEETEKRLRD

SEQ ID NO: 20757 - protein, 57 aa, Artificial Sequence
  Synthetic
DELEEILRRVDELIKTIEEELKKIEKRVKELLETHRELNKRLLDDHRRLAEEVKKAN

SEQ ID NO: 20758 - protein, 60 aa, Artificial Sequence
  Synthetic
RDRVEDVLRKIAEKIKRLEDRIKEVLDKLRKLAKELEDESRKVLDDSNKLIERVKRELKR

SEQ ID NO: 20759 - protein, 60 aa, Artificial Sequence
  Synthetic
DTERVVTEIKKTNDELKRRHEKVVEDDRRLLEELRRRHERVVREVERLLRELKERVDRRA

SEQ ID NO: 20760 - protein, 59 aa, Artificial Sequence
  Synthetic
REVLKKLLDDNRKIIEDLTRKNEKLHEDSKRIIEKIDDENREILRRVEEIVRRIEEELN

SEQ ID NO: 20761 - protein, 55 aa, Artificial Sequence
  Synthetic
SAEDVKRRIKESADRIRKRLREALERAKKLHTDNEEENKRVNDEIKKRVEEIRRR

SEQ ID NO: 20762 - protein, 59 aa, Artificial Sequence
  Synthetic
EKLLRELERDVRRLEREITEVVKRLEDEHKRASERNKRLLEEIKDRVRKLIEEAEERRK

SEQ ID NO: 20763 - protein, 60 aa, Artificial Sequence
  Synthetic
EEVERVRRTIDELSKENEKALKEVEERIKKLSDENEKAVRKAEEDNERLNRTAERLKRSN

SEQ ID NO: 20764 - protein, 56 aa, Artificial Sequence
  Synthetic
EKVLRDIRKKIKENHEKNERVIREIERLLKENEERNEEVIRRIKESNRKTEKDLTD

SEQ ID NO: 20765 - protein, 60 aa, Artificial Sequence
  Synthetic
SEVEEVERRIDRLSKENRRVLEEAKRRIKKLSDENKRMLEEARKRNEKLNREVKKLKKSN

SEQ ID NO: 20766 - protein, 56 aa, Artificial Sequence
  Synthetic
EKVLRDIREKAKRNHDANEKVIREIRDILRRNNEENKRVIEEIDKSNKDTEDELRK

SEQ ID NO: 20767 - protein, 59 aa, Artificial Sequence
  Synthetic
REVEEVKKEIKKLSDENKEVLERARKRIEDLSRENEDVLRRLKERNEDLNRRVRELKER

SEQ ID NO: 20768 - protein, 56 aa, Artificial Sequence
  Synthetic
EEVLRDIRRELKENHDENRKVIEDVRRIAEENHRRNKRVIDEIRRSNKETVDELRK

SEQ ID NO: 20769 - protein, 59 aa, Artificial Sequence
  Synthetic
RAEELRKEIEEIIKKNKKENEDVLREDRRRLKELKEEIEKVVREDRRTLEELEERLRRS

SEQ ID NO: 20770 - protein, 59 aa, Artificial Sequence
  Synthetic
EEVLKEIRERVEKLSEKNKRALEKWKRDSERLSREVERELEEWKKRSKRLAEEVEEATR

SEQ ID NO: 20771 - protein, 61 aa, Artificial Sequence
  Synthetic
DLEELEREVEKKLKELEDRVRKVIEESKTELKKLEEELRENSREVRDILRRLEEDVRRKVK

SEQ ID NO: 20772 - protein, 59 aa, Artificial Sequence
  Synthetic
KRLLEELRRRLDRVRKEVERLIKEHRETTDELRKRVEKLSEDHRREVEKLAKTVKDELK

SEQ ID NO: 20773 - protein, 61 aa, Artificial Sequence
  Synthetic
SRAEKIREDIRRLRKENEDRIKEIEDEFRKLLEEHERKNKEIEERVRRLVKRIEDEIRRKN

SEQ ID NO: 20774 - protein, 55 aa, Artificial Sequence
  Synthetic
DELAKRVREVSEDVNRRLDKIMKDLRRVIKELDEESKRLLEEIKRRMEEILEELR

SEQ ID NO: 20775 - protein, 60 aa, Artificial Sequence
  Synthetic
SEEEKLAKDNERLVREHEEESKKLLKTIRDLSEEHKRDLKRAMEENKEKVDRLRDMLKRG

SEQ ID NO: 20776 - protein, 55 aa, Artificial Sequence
  Synthetic
EEIATKSEELHKELEETNERIAREVEKLEKENDEILEEIADRSRRLHEDLDRERK

SEQ ID NO: 20777 - protein, 61 aa, Artificial Sequence
  Synthetic
DELEEVLRTIEKLVEDHNRELERVLRRVKELADRHREESERVAREIKKLVDDARRLVEERG

SEQ ID NO: 20778 - protein, 58 aa, Artificial Sequence
  Synthetic
DEVRRIRERVKELLDRNRERLERIEREIDRLLEDLKRKNEKIEREVRRLLAKLKEEAR

SEQ ID NO: 20779 - protein, 61 aa, Artificial Sequence
  Synthetic
SELEKIVEENRRLVKEHNERLKRILDELRELAKRHEDRSRKAMKENEELVRTVLELMKRDG

SEQ ID NO: 20780 - protein, 58 aa, Artificial Sequence
  Synthetic
EKVRKIREESKRLHETNRRRVEKIEEEIRRLLKRLEDTNRDIERRSKKLHEDLEREAR

SEQ ID NO: 20781 - protein, 61 aa, Artificial Sequence
  Synthetic
SELDKVMRDNDRLVKEHAEVSKELLDRLKKLAEDHKKRSEEVLRENKRLVDEVRRLAKERG

SEQ ID NO: 20782 - protein, 58 aa, Artificial Sequence
  Synthetic
EKVRKIARRSDDLHRELKERNDRIKREIERLLEELKRTNDKIVEDSKRLHDDLEREAR

SEQ ID NO: 20783 - protein, 61 aa, Artificial Sequence
  Synthetic
DELEEIRKTIEELSKENKKKLEEVMKEVEELARRHEKRSRDLLRRLKKLVDELRDRVEKTG

SEQ ID NO: 20784 - protein, 58 aa, Artificial Sequence
  Synthetic
ERVRKISEDVRKLLEDNKRIAERIDERIKELLKRLEDTNRRIEEEIDRLLEELKREAD

SEQ ID NO: 20785 - protein, 57 aa, Artificial Sequence
  Synthetic
DELDDLLRRAKETSDRHKETLKKILDEMREEVKRHNRDLERILEEVKRLIDEVRKAN

SEQ ID NO: 20786 - protein, 59 aa, Artificial Sequence
  Synthetic
REDVKRIKETMKKLLDENRTEVEKIKREADRLLEENRRLVKEIEDTIRELLKRLEDERR

SEQ ID NO: 20787 - protein, 60 aa, Artificial Sequence
  Synthetic
SKKETIKKDAEEALKRSKKKLDELKERLRKVMRETEERLRRLEKELRDLAREIREKIKKR

SEQ ID NO: 20788 - protein, 55 aa, Artificial Sequence
  Synthetic
DRLRKEVEDLNRETDKVIEKLREDIDRLDKESEEVIRRLKDEIRRLFEEIDRRLR

SEQ ID NO: 20789 - protein, 61 aa, Artificial Sequence
  Synthetic
SELEEVKERVDRLIREVEKMNRDSERRVKKLIDDVRRENRRTEEDVRRLVKRAEEIVRKDG

SEQ ID NO: 20790 - protein, 59 aa, Artificial Sequence
  Synthetic
KEKVDRLKKEADDLLRKIKEDNERITEKVKELLERLRKNNEEIKREADRLLEELRRRVK

SEQ ID NO: 20791 - protein, 57 aa, Artificial Sequence
  Synthetic
SELEELDKRITELSEEIKRRLEELLRRNEDLSRRIEEAIRRILKRNEDVIRDIKRKN

SEQ ID NO: 20792 - protein, 58 aa, Artificial Sequence
  Synthetic
KKVRDIEEKIERLNRELEKIAKEIRERTERLNKRLEELIREVDERNRDLLRRLEEEVK

SEQ ID NO: 20793 - protein, 60 aa, Artificial Sequence
  Synthetic
KDEEDARRKLEELRELARRDIERNKRELERLRREIEKDEEDNEEVIKRLRERVEELRRRQ

SEQ ID NO: 20794 - protein, 58 aa, Artificial Sequence
  Synthetic
ESLKRLKEELEKLLRDYKKKLDDSDKELRDLLAEYDDRLTRSDKRLRDLLKEAREKSK

SEQ ID NO: 20795 - protein, 61 aa, Artificial Sequence
  Synthetic
DTAERAEEELERSDRELKETLRRAEEELKRSHKELERIVERARRELRRLAEELEEVIRRKK

SEQ ID NO: 20796 - protein, 60 aa, Artificial Sequence
  Synthetic
EETLRRKLERLLERHKKVVDDVERTLRDLLERHKEVVERVREKLTDLLRKLKKVIDDVRR

SEQ ID NO: 20797 - protein, 58 aa, Artificial Sequence
  Synthetic
SELETIKKRAEELSKESEDILRDIERKLRKLSEESKDILRRLKEELEKLHKELVDKKG

SEQ ID NO: 20798 - protein, 59 aa, Artificial Sequence
  Synthetic
EELEKELEEVLTEYREVVERLADELRRLLKKYEDDVRRLEEHARRDLEKLDRDIKEEER

SEQ ID NO: 20799 - protein, 57 aa, Artificial Sequence
  Synthetic
SKLDDLLRKIERLVTESLRRLRKTNEDAKRLLERSVRELEKSNKEIRDLVKEIKERN

SEQ ID NO: 20800 - protein, 59 aa, Artificial Sequence
  Synthetic
KKKVDELRERLRELLKRHRDAVEKNRRDLEKLREDHRRLVEKNKRDLDKLKEELDRTKK

SEQ ID NO: 20801 - protein, 57 aa, Artificial Sequence
  Synthetic
SELDELLKRLEELVREIIKRLRDSNRRAKEVVDRSVKRLEESNRTLRELIKDVKDKN

SEQ ID NO: 20802 - protein, 59 aa, Artificial Sequence
  Synthetic
EEKLRRIKRRIDELEKTLRKIIKDNTDNLRKLTEDHRRLVEKNKRDLEKLEEELKRRRK

SEQ ID NO: 20803 - protein, 57 aa, Artificial Sequence
  Synthetic
SKLDELLERIREEVKRSVKRLEDSNKEIKRLMEESADELRRSNKELRDAVRDLKRKN

SEQ ID NO: 20804 - protein, 59 aa, Artificial Sequence
  Synthetic
EEKVRRLDKVLEDLRREHEKIVRDNEENLRRLLERHKRLVDKNKEDAERLLRELRETVR

SEQ ID NO: 20805 - protein, 59 aa, Artificial Sequence
  Synthetic
SELEELLKRLRDLIERIVKRLRELSKESEDLIRRIERTIEKLSEDSERAIEEILRRIDK

SEQ ID NO: 20806 - protein, 59 aa, Artificial Sequence
  Synthetic
EDRLREVEEEAKKLEKRIEDMIRKHKETNKRLKEELDKLVKEHKDRNRKLLEELKKRAT

SEQ ID NO: 20807 - protein, 61 aa, Artificial Sequence
  Synthetic
SEIEEVIERLDDTMRRIEERIRDTNRRLKKVIDDSKRRNERTNREVRKTIEKLTRELERDG

SEQ ID NO: 20808 - protein, 54 aa, Artificial Sequence
  Synthetic
EVKRRLEELRRRIEKMLEEHRESLRRLEEELEESHKRHKDTLRKLSKELEEKLK

SEQ ID NO: 20809 - protein, 61 aa, Artificial Sequence
  Synthetic
DEVDEVLKRVDELLKRHEETNKRLEEEIRKIHEENKRTIEELLKEVRKRAEEVERLVRRDG

SEQ ID NO: 20810 - protein, 59 aa, Artificial Sequence
  Synthetic
EEELKRVKERLKEIRKRAKESHDRLRETVKELIDRNRKLLRELEEELRKIEEKIREDAR

SEQ ID NO: 20811 - protein, 56 aa, Artificial Sequence
  Synthetic
SEEDELRETAKRIREEVKKSIEENRELAKRITDEVRELLERNKRRIEEVKERLERS

SEQ ID NO: 20812 - protein, 56 aa, Artificial Sequence
  Synthetic
EDDLRRRLEELLKRLRDESRKVNEDLKRLVDELRRLSKEMNEELKELEDRVREKER

SEQ ID NO: 20813 - protein, 57 aa, Artificial Sequence
  Synthetic
SEEDEVREDNKRIVEEVERLLKEIEDNNREITREAEELLKRLEEEARRLMEEIRRSK

SEQ ID NO: 20814 - protein, 60 aa, Artificial Sequence
  Synthetic
DEELLRRLRDMNRRSKERADRLIEEAKKENDRSSKRVRDLIREVDEILKEVKKRVEDVTT

SEQ ID NO: 20815 - protein, 56 aa, Artificial Sequence
  Synthetic
SEAEKVVEELKKLLREVEKKIRDHTEDVKRILEELERRLRKHSEEVRRTAKELKDK

SEQ ID NO: 20816 - protein, 59 aa, Artificial Sequence
  Synthetic
EKVLRELEKILEDIKRTLDKLLRENRETLKRIEDRLRELLEENRKLLEKIERELRERSR

SEQ ID NO: 20817 - protein, 56 aa, Artificial Sequence
  Synthetic
SEVEDVIRKLRRKAEDLTRRLKEHTDDVKRLMEELSKDIKDHTREVKRIAREAKEK

SEQ ID NO: 20818 - protein, 59 aa, Artificial Sequence
  Synthetic
EEVLRDLERVLRDIERRLRELLRRNEEVLDRIRRTLEDLHRKNEEVLREIERDLRERER

SEQ ID NO: 20819 - protein, 56 aa, Artificial Sequence
  Synthetic
SEVEDVIRRLKKKLRELVERIREHTKRVRDLARKLEEEIKRHTEEVKRIADEAKKR

SEQ ID NO: 20820 - protein, 59 aa, Artificial Sequence
  Synthetic
DELLKRLEDVLRKIRKDLEELLRKNNRDLEEIKKRLEELHRRNRETLERIRKDLEEDER

SEQ ID NO: 20821 - protein, 61 aa, Artificial Sequence
  Synthetic
SEIEEVLERIKKLLDELRKESRKLLEDHKKRAEELEEKARRLSERHKELLDRLKEVVDRDG

SEQ ID NO: 20822 - protein, 59 aa, Artificial Sequence
  Synthetic
EEMLKRAEDLLRRIDEELKRSHEELKELSDRIRERLERLLRTLEELSKEIDKRADDLRK

SEQ ID NO: 20823 - protein, 61 aa, Artificial Sequence
  Synthetic
SEIERVLEELRKLLEELRRESKKLLDELRKLLEDARRESEKLLRELKDLLRRAEELVKRDG

SEQ ID NO: 20824 - protein, 59 aa, Artificial Sequence
  Synthetic
EKVLDELRRELDKIREDLKKSHRELEELIKKIRTELDKSNRKLEELLKRIEERLDEMRR

SEQ ID NO: 20825 - protein, 61 aa, Artificial Sequence
  Synthetic
SEAEKVLEELKKLLRDLEETSKRVLREIRELLKEAREKSKRLLDRLRKLARDLKELVRRDG

SEQ ID NO: 20826 - protein, 59 aa, Artificial Sequence
  Synthetic
KEVLDRIKRLLEEIERELERSNKELEDLLRKIEEDLERSHRELEKLIREILKELEDARK

SEQ ID NO: 20827 - protein, 57 aa, Artificial Sequence
  Synthetic
DAEERLRKLLDDIRRELKRLTEETRKSLEKIKRDNDELEKKLRKLNEDSDRRLKEAN

SEQ ID NO: 20828 - protein, 59 aa, Artificial Sequence
  Synthetic
EKTIEDLLRELEKALRDLEKEVREINKELKRVLDEIAKTHEDLLKKHEELLRRVEERAR

SEQ ID NO: 20829 - protein, 57 aa, Artificial Sequence
  Synthetic
DLERELEKLLKDIKEELDKLIRTNEETLKEIEREVRKLLKRNKELLDRIREEVRKTG

SEQ ID NO: 20830 - protein, 59 aa, Artificial Sequence
  Synthetic
KEVVDRILKEARELLERIREENRRTLEDLRRILEDLRRRNKRHLDELRRVLKELRDKRK

SEQ ID NO: 20831 - protein, 56 aa, Artificial Sequence
  Synthetic
SLEERLEKLLKEIRETVKKNIEENRDLLRRVEEDLRRLTERNKRLLEKIRDALRKA

SEQ ID NO: 20832 - protein, 59 aa, Artificial Sequence
  Synthetic
EEVARRLMDDLRRLLEKIDRLSREHLERVRKILEDLRRLSEKHLKELEDLLREAEEEAR

SEQ ID NO: 20833 - protein, 56 aa, Artificial Sequence
  Synthetic
SLEERLEELLDEIRKMLKRLEDENRRLLKEIEKRVRENTRTNRELLKRIEDRIRKA

SEQ ID NO: 20834 - protein, 59 aa, Artificial Sequence
  Synthetic
EEVVRTLLRELEKILAEAEDLSRRHLERLRDILREAEDLSRKHLEELKKVLEELERRAK

SEQ ID NO: 20835 - protein, 57 aa, Artificial Sequence
  Synthetic
SDVERLLRELEDLLRRLEERIRELNKRHEELVRRLKEEVKRLSREHNEVVADVARKN

SEQ ID NO: 20836 - protein, 59 aa, Artificial Sequence
  Synthetic
KELRDRLRDVVRRLEDELRRLDDELRKNSEEVKKVLDDLRRHLEENSKRAEDTLRELRR

SEQ ID NO: 20837 - protein, 57 aa, Artificial Sequence
  Synthetic
SEVEKLLRELEKALEDLRRTNEKLDREHDAVVKEVKKIAKDLSREHRDVVEDVKRKN

SEQ ID NO: 20838 - protein, 59 aa, Artificial Sequence
  Synthetic
EELRDELRRVVEDVEKKLDDLRKRNEENSRKVKEVLEKLTRELDKNREEVERTLEELRR

SEQ ID NO: 20839 - protein, 57 aa, Artificial Sequence
  Synthetic
SEIEKLLEEIKESLERLKKTAEDLLEELRRLLEELERRVKELSDEHRRLVKELKDRN

SEQ ID NO: 20840 - protein, 59 aa, Artificial Sequence
  Synthetic
EELKKRVEDVLREIKRAHDDLRRRLEKILRDIEKTIEDLERHMKENHDDAERVIEELKR

SEQ ID NO: 20841 - protein, 60 aa, Artificial Sequence
  Synthetic
SEEEALERVLRELRRSLEELEEELRRAIRKLEDNLRRLREALETILKKLDDLLDDLRRRK

SEQ ID NO: 20842 - protein, 55 aa, Artificial Sequence
  Synthetic
DKLKKEADDLDRRSRKTIKEVLDEIKELDDRSNERIEEVIREIEDEARRLAREVD

SEQ ID NO: 20843 - protein, 60 aa, Artificial Sequence
  Synthetic
SEEERLREIRERLKKSLEDLKRELEEILRELERSLDKLRRDLERLLEDLRRLLDELRRRK

SEQ ID NO: 20844 - protein, 55 aa, Artificial Sequence
  Synthetic
EELEKKARELNERSKEKIKRLLEKLRKLDKESKDEIKRVLDKLRELAKRIKEEMD

SEQ ID NO: 20845 - protein, 60 aa, Artificial Sequence
  Synthetic
SEEERLRRVIEEYKRVLDELSERLKRLLDELRRSLKKLEEDLKRLLDELKRTLDELIRRV

SEQ ID NO: 20846 - protein, 55 aa, Artificial Sequence
  Synthetic
EELEKKLREALDTVRRLYEALIKKARELDKRSKDEIKRVVDKLKKLVRDIEERVR

SEQ ID NO: 20847 - protein, 60 aa, Artificial Sequence
  Synthetic
DDIEDVLRRIEKLIRDLRDHSRKLVEEIEKLIEDHTRHSRKLERDIKELLKRLRELRRRG

SEQ ID NO: 20848 - protein, 59 aa, Artificial Sequence
  Synthetic
EEVKKRLDEARRKAEKVVKESRDTLRELKDKVRENLDRSRKELKKLEEELEEVLREARE

SEQ ID NO: 20849 - protein, 60 aa, Artificial Sequence
  Synthetic
SDVERVAKTIEDLIREHTEHVKRSAERVERLIKEHTDHVRRSLTRIEDLLRRLEEMRRRG

SEQ ID NO: 20850 - protein, 59 aa, Artificial Sequence
  Synthetic
EDVERKARELERKVRENVRKVRDDHRKLEEKFRDNLRKVKREHEEAERKMRDLLREARR

SEQ ID NO: 20851 - protein, 60 aa, Artificial Sequence
  Synthetic
KDVDKVEEDIERLLADLRRHNEKLHRDIERLLEELRRHNDKLRKTLEDLLKKLKELAERG

SEQ ID NO: 20852 - protein, 59 aa, Artificial Sequence
  Synthetic
EDVKRRLEDLERKARRVLEESRKDLEEAKKKVDELMKRARDSLRELTRRLEELVRRIRK

SEQ ID NO: 20853 - protein, 60 aa, Artificial Sequence
  Synthetic
SEVEEVMKEIERLIEELRRHNEELARRLEELIKDHTRHNEELHKTIEDLIKELEDLARRG

SEQ ID NO: 20854 - protein, 59 aa, Artificial Sequence
  Synthetic
EEVEKRLRELKEKLDKVLDELRETLKRLEEKARENLKRSRDDLETIKRKLKKVMDEARR

SEQ ID NO: 20855 - protein, 59 aa, Artificial Sequence
  Synthetic
SDVERLIEELERLLDELRKKTEEIIRRIKKLIDELRRKTEEVIKRLEKLARDLTRLTER

SEQ ID NO: 20856 - protein, 59 aa, Artificial Sequence
  Synthetic
EEARRRIDEIRKKAEEVNKESRDRLRRLKEEVDKVDKDSKRRLDELREELRRLMEESKR

SEQ ID NO: 20857 - protein, 60 aa, Artificial Sequence
  Synthetic
DAARELRERLKKAIEDHRRLLERAARDVERLNKELEDILRRMAEDMKRSIEELKRVSEEG

SEQ ID NO: 20858 - protein, 56 aa, Artificial Sequence
  Synthetic
EKDLRRLEEEIRKEIRRSNETLKKLKKKTEDSLRTIKRRLEELHEEAKKVLDDLRR

SEQ ID NO: 20859 - protein, 59 aa, Artificial Sequence
  Synthetic
REDETLKRLEEENEEVNKRSEETLRKLLEDNRRLLERIEERLRELLEELRRLLEKIRKD

SEQ ID NO: 20860 - protein, 56 aa, Artificial Sequence
  Synthetic
KDELTERVKRHIEENKKLTEDVARKSEKHLRDLEELLERLRKLVEDLLRRLEEEAR

SEQ ID NO: 20861 - protein, 59 aa, Artificial Sequence
  Synthetic
SELEKVRKESERNLRSNEKLLRELDELSERNLDKLRRFVEEVRELVREMLERLDSVRRR

SEQ ID NO: 20862 - protein, 59 aa, Artificial Sequence
  Synthetic
EEVKRDVERNEKENKELLDRTRRKVEENAKRNKKLLEDIREDLKRLATELRRKLEEIRR

SEQ ID NO: 20863 - protein, 61 aa, Artificial Sequence
  Synthetic
DKEETVKDLERRYRDLLREIEKRLRELVRRNDKLLEEIKKAIEDLIRENEKKIKEIKERRG

SEQ ID NO: 20864 - protein, 55 aa, Artificial Sequence
  Synthetic
DELRRRAEEALERNKRLLEELKKENDDHLKRLKELLEELKKRNEDHLRRLDEEER

SEQ ID NO: 20865 - protein, 59 aa, Artificial Sequence
  Synthetic
KELEEIKRAVDESLKRAKELMDRHRREVEKSLEEMKRLAEDHKRRADRLLKELKRLADE

SEQ ID NO: 20866 - protein, 59 aa, Artificial Sequence
  Synthetic
DEVRRAVKELKDRHKELLDRIERESERLREEHRRLLEKIERTSEDLIRRLEKLIRDIRR

SEQ ID NO: 20867 - protein, 59 aa, Artificial Sequence
  Synthetic
DEVETVEEEVKKSLEELRDLARKHEKKVRESLKRLEESLRRSEEKVKDIIRRLEELKKR

SEQ ID NO: 20868 - protein, 59 aa, Artificial Sequence
  Synthetic
EEVKKRLEDLRKEHEDTLRDIERRSRELLKRHKDKVDEIRKAHERLIRELEEIARRIKK

SEQ ID NO: 20869 - protein, 59 aa, Artificial Sequence
  Synthetic
SEEEELKKKLEKSLDELRRSLKKSAEDVRRILEELKELMKRHKEVVEEIARELDELRKR

SEQ ID NO: 20870 - protein, 59 aa, Artificial Sequence
  Synthetic
EDVERSLRDLRRKHKELVDRIDEEHKRLEKELRDIIEEIERRSRKLLKELEDIIRETRR

SEQ ID NO: 20871 - protein, 59 aa, Artificial Sequence
  Synthetic
SLEEELKRVMKEVRDLAKEHSDRSRDVMREIRELSEENERRLRRVLEEAKRLADDLRRD

SEQ ID NO: 20872 - protein, 59 aa, Artificial Sequence
  Synthetic
ERLKDILRRIREDIERLLDELRKLNEKIKRDVDRLLKENKETLDDIERRIRKLLDDERR

SEQ ID NO: 20873 - protein, 60 aa, Artificial Sequence
  Synthetic
SVEELITRVERENERVARRDEELLRENEKRNRDVTREDRDLLKKLKEEVEEVLKRIREEG

SEQ ID NO: 20874 - protein, 59 aa, Artificial Sequence
  Synthetic
EETVKELVKHNEDLLRKWEKKSEDLSRKNEEALERWRRKSKKLAEELKKTLEDIRREVT

SEQ ID NO: 20875 - protein, 60 aa, Artificial Sequence
  Synthetic
DVEDKIRRLKERIKEVTERDRKLLEELKREAEEVLRRDKKSLEEVEREIEEILKDAERKG

SEQ ID NO: 20876 - protein, 55 aa, Artificial Sequence
  Synthetic
DELIREVEKVLEDWKRKVDELNRRLKKVLKEWEDTVRKLNEELKDVLDKLREELD

SEQ ID NO: 20877 - protein, 56 aa, Artificial Sequence
  Synthetic
DMEDKLRKIKEAIKKVLDEIRKLLEDIRRRLKRVREEIEEIHKRNEEENDRVKKEL

SEQ ID NO: 20878 - protein, 55 aa, Artificial Sequence
  Synthetic
DELIKKIRELLEELKDELRKLLEEAEEVLERLKRSVEELSRRNKKLVEDLDRKTR

SEQ ID NO: 20879 - protein, 56 aa, Artificial Sequence
  Synthetic
SVEEKARDILEKLKRVVEKIKEIADRNRRENEDADREIKRLIEENKKRNEDLLRRL

SEQ ID NO: 20880 - protein, 55 aa, Artificial Sequence
  Synthetic
DELIKRIKEIIETLEKEVEDLSRENKKKVEEILDKVRKVSTRNREKLDELDKKVR

SEQ ID NO: 20881 - protein, 61 aa, Artificial Sequence
  Synthetic
SDEEILRELEKRLEENVRRVEKRHEELEREVRDNLRRAEEKHRELEERVKRVIEEVIRTKG

SEQ ID NO: 20882 - protein, 59 aa, Artificial Sequence
  Synthetic
EEMVRKLVEDVDRLITDHTRSLEDVDRKVKDVIRRHTDSLRKVEEDVKRIIEELRKKAE

SEQ ID NO: 20883 - protein, 61 aa, Artificial Sequence
  Synthetic
DDEEILKKLREDVERVIKKIEDSLRELRKRLKDNVDRAEELHRRLEERAKKLIDEIIKKRG

SEQ ID NO: 20884 - protein, 59 aa, Artificial Sequence
  Synthetic
REFVRRLAERVKKLLKELEDRLRELEERVKEVITRHTRSLEEIVRRVERVLEEMERAAK

SEQ ID NO: 20885 - protein, 60 aa, Artificial Sequence
  Synthetic
SETEEAKKEIDEIIKRIEEETKRLRETYKRIIEEIERVSKRLEDEYRKLIEELERAKREG

SEQ ID NO: 20886 - protein, 55 aa, Artificial Sequence
  Synthetic
EELDKLRRRLEEILKRHEESNKKLSEDLERILEEHRRENERLHRELREILERLRR

SEQ ID NO: 20887 - protein, 56 aa, Artificial Sequence
  Synthetic
SIEDILRELEKELRESSKRSREILERLREELRDSSRRSEEILERLKRKVKRVKEEI

SEQ ID NO: 20888 - protein, 59 aa, Artificial Sequence
  Synthetic
DKRVREVAERLRRLNERYNREVKRLEKEARRLNEEYNRLVERLAREVEKLIRDLKEEAR

SEQ ID NO: 20889 - protein, 59 aa, Artificial Sequence
  Synthetic
SLEDLVREIRKRLDDMEREVKKVDDESRKRLDEARKRVEKINRESEKRLKEVADELSEL

SEQ ID NO: 20890 - protein, 59 aa, Artificial Sequence
  Synthetic
EKLARDLRREVRKLEKRLEELLKELKETTEKILRELERLLKKLEDDTRRVLEEIKELKR

SEQ ID NO: 20891 - protein, 58 aa, Artificial Sequence
  Synthetic
DEEREVKRKYREDLDDIRRHSEEVLKRYDEAVKKLDEDLKKVVEEYERALEEIVRRAG

SEQ ID NO: 20892 - protein, 56 aa, Artificial Sequence
  Synthetic
EEMSKDLERELRRSRRENERLAKELEDALRKSEEDIRRLVEENKERLERLERELSR

SEQ ID NO: 20893 - protein, 61 aa, Artificial Sequence
  Synthetic
SEAEKVEEEVKELVKRNREKHDEIRRRIEKLKEDLKRTSERSERKIKRLVEKIDDTLRKKG

SEQ ID NO: 20894 - protein, 59 aa, Artificial Sequence
  Synthetic
EDELKRMADTIRDEIRKDNERLRRTLEKAKREADEYRERDKRKLEDFEREIRRIEEETR

SEQ ID NO: 20895 - protein, 56 aa, Artificial Sequence
  Synthetic
DEREEIEKTIRELMRENDDLVRKIRREIEESLRENRRTLEKIKKEIEELTRKAKRD

SEQ ID NO: 20896 - protein, 59 aa, Artificial Sequence
  Synthetic
EETLRKRLEEVKRKSDEHKKELEERLREVRRRSERVNEELKKTLEEVRKKIRELIERDR

SEQ ID NO: 20897 - protein, 59 aa, Artificial Sequence
  Synthetic
SEEEVARRVEERVEELDRRLREIVKDLRDHNRRMKEKLEEAVERVRRRDKELDDILRET

SEQ ID NO: 20898 - protein, 55 aa, Artificial Sequence
  Synthetic
EELRKKLEDLRRKIDEKVKKVTKEHRDSAKKIRDDVRRVKEENKKANRELAEKRR

SEQ ID NO: 20899 - protein, 58 aa, Artificial Sequence
  Synthetic
SREEEVEEEYERLLEEIRRRVKEVEKEYRDLLKKIEDDVREVRKEYEKLVEDLSRKAG

SEQ ID NO: 20900 - protein, 56 aa, Artificial Sequence
  Synthetic
EDASRRLRDIARRSREELEEEVKRLRTEIEKSERELRETTKENRKIIEDVRRRLEK

SEQ ID NO: 20901 - protein, 58 aa, Artificial Sequence
  Synthetic
SEKEEVEREYRELLKEIEKRIDEVIKEYRDLLRDIRREVKRVLREYAELVKELKKTTG

SEQ ID NO: 20902 - protein, 56 aa, Artificial Sequence
  Synthetic
DEAARELRKKAEDSKRELEKLEEENRRIIKRSRERLKKIEEDNRRIIKEVLDRARK

SEQ ID NO: 20903 - protein, 59 aa, Artificial Sequence
  Synthetic
SKEELVKKARDELRRVLEELKRAVDELRKRDEDYERKSEDVVRRLRKIDKDVREVLRRG

SEQ ID NO: 20904 - protein, 55 aa, Artificial Sequence
  Synthetic
EEVEEEIRREAKRIDDELEKVEEENKRTLDRAKKHNEEVEKENRDTLREIDKERE

SEQ ID NO: 20905 - protein, 62 aa, Artificial Sequence
  Synthetic
SIEEEAKEIIDKVRKEVEDIVRRLKETNDEVRERLERILRRLEEVDEEAKRRVEELRERKRT

SEQ ID NO: 20906 - protein, 55 aa, Artificial Sequence
  Synthetic
DRLREELEKLARDVERRTRELEKHHRELMKRAKEETERLERHHDELAKRVREKLK

SEQ ID NO: 20907 - protein, 60 aa, Artificial Sequence
  Synthetic
DEIETVLDEVRRLHEDAKRRLEEMIDEVRKLNEESVRELARVVEEVERLLRTVKEEVERA

SEQ ID NO: 20908 - protein, 56 aa, Artificial Sequence
  Synthetic
AREALKESRKVVEESRESVRRVLEKNRRVVEESKRLAEELLRRVKKVVDEIRKRVE

SEQ ID NO: 20909 - protein, 60 aa, Artificial Sequence
  Synthetic
DELEEVVRRVRELSRTVKEELREVIERVRELSERVKKKLRKVLREVAELHREVMKRVRDS

SEQ ID NO: 20910 - protein, 56 aa, Artificial Sequence
  Synthetic
AEEVLREVEKVVEDSRRSAKDALKRVEDRVRESDKSVRELLEENRKVVEDIKRRVD

SEQ ID NO: 20911 - protein, 60 aa, Artificial Sequence
  Synthetic
EELERILDKVRKVIEEVRKRLRDDLRTVEKVLKETEEVLRRAAERAKRALERVEEAARRG

SEQ ID NO: 20912 - protein, 55 aa, Artificial Sequence
  Synthetic
REVLRKVRELLRTIREEVERVLRKSNELSTRIKKRIDDVLETLERLLKELDDKLR

SEQ ID NO: 20913 - protein, 60 aa, Artificial Sequence
  Synthetic
KDVEDVEREVDEVVKRSDDTVEENLRRAEDVVRDTDRIVKEMKERIDRVVERVEEVVRRG

SEQ ID NO: 20914 - protein, 55 aa, Artificial Sequence
  Synthetic
EEVLRKVTRLLREAKRRTEESHKKVNDLSRRVKERVDEVLERVKRLLEEVKRKVK

SEQ ID NO: 20915 - protein, 60 aa, Artificial Sequence
  Synthetic
DEAEKVLKESKDTVDKIRRDVERLVDESRKTVDRIRELVDKAVKDSKDSVDRLRDVMRRN

SEQ ID NO: 20916 - protein, 56 aa, Artificial Sequence
  Synthetic
EEVLRRIEKVNRDVARRVEEVFREAKEVNKKVDREVEDVIRKVKRVNEKVDEELKK

SEQ ID NO: 20917 - protein, 59 aa, Artificial Sequence
  Synthetic
SEAEEVVRRSRETVTRNVRMLEKVVRDSEETVKKIVRDVERLLEESKKSVDDLRRLKEE

SEQ ID NO: 20918 - protein, 56 aa, Artificial Sequence
  Synthetic
EKVLREVKEVNERVRETSRDIADRVREVNEDVKRKVKKVIDDIRRVNEKVKRELEK

SEQ ID NO: 20919 - protein, 60 aa, Artificial Sequence
  Synthetic
DEAREVVKRVKDLVRRLRRLSEKSLEDDKRLIEEVNKRSKDILDKVKKLVDDLRDMVRRT

SEQ ID NO: 20920 - protein, 56 aa, Artificial Sequence
  Synthetic
EEVIKEIERVVRKVLEESREVHERIRETVKEVNDRNRKVLREIREVVKKVFEDARR

SEQ ID NO: 20921 - protein, 59 aa, Artificial Sequence
  Synthetic
SDAEEVVRENRELVERIVREVEKILRDNEELVKRLVELVETSLRRNEKMVDELKKLVDR

SEQ ID NO: 20922 - protein, 56 aa, Artificial Sequence
  Synthetic
SRVIKEIRDTSKDAVRKVEEVLRRIEETVRDAERKVKEVIKRIRETSKEVLDRVRK

SEQ ID NO: 20923 - protein, 60 aa, Artificial Sequence
  Synthetic
DAAERALRRSEEVVRESVEEVKTWVDENRRSVERLREELRKDEERVRRVVERIRKLVEDG

SEQ ID NO: 20924 - protein, 56 aa, Artificial Sequence
  Synthetic
EEVLKRVRKTNDDSDKEVKRLIDEARKLNDDVRKEVEEVLERTTRILDRVRKEVEK

SEQ ID NO: 20925 - protein, 60 aa, Artificial Sequence
  Synthetic
DEAREVERRVREMVKELKRRLEEDVKESDKSVKDLERIAKEDVDRSRESVKELRDRVRRR

SEQ ID NO: 20926 - protein, 56 aa, Artificial Sequence
  Synthetic
EEAVRRVKRIIEEVRKVLEDVFRESERLNREVREKLKRMFETSKELNKRVEEALRE

SEQ ID NO: 20927 - protein, 61 aa, Artificial Sequence
  Synthetic
DSRRELEDDVRRIVETNRRLLEELERRVKKILEENRRLVEELRKENERIVRELTDRVRRDG

SEQ ID NO: 20928 - protein, 56 aa, Artificial Sequence
  Synthetic
EDVVRTVEKLIRDLEEESRRVLEEVRRLLDEVRKESEEVHKRVNEIVKRVEDEIRR

SEQ ID NO: 20929 - protein, 59 aa, Artificial Sequence
  Synthetic
SSKDEIRRRVEEVVERSDEIVKRSREHVKTVVDELDRVVKELERKVREVVKKLDKIRKD

SEQ ID NO: 20930 - protein, 56 aa, Artificial Sequence
  Synthetic
ERALREVEEISRKSEEKLRRVLKESEDIAKEAEDRLKTVLERVERIADEVLKRLTK

SEQ ID NO: 20931 - protein, 59 aa, Artificial Sequence
  Synthetic
SKVKEVEDRVREVVKESERVARESLEHVRRVVRKTEDVVRRLKEKVRKAVEDLKEIKRR

SEQ ID NO: 20932 - protein, 56 aa, Artificial Sequence
  Synthetic
EEVLKKVEEISERSRRELRRALKESDKISEESLRRLRKVLREVEEIVRRVLEELRR

SEQ ID NO: 20933 - protein, 59 aa, Artificial Sequence
  Synthetic
SKVEKLEEEIARLVERSRRLVEELKKEVTKVKEKVDEIVERSRRHVKKVVEKLRDIKRR

SEQ ID NO: 20934 - protein, 56 aa, Artificial Sequence
  Synthetic
EEVLRRVEETSDRSEKELRTVLRDVTEDIKRIAEELKKALEDSTEIIRRAEDELRT

SEQ ID NO: 20935 - protein, 61 aa, Artificial Sequence
  Synthetic
DSDRKIDDEVRKVVETSERSLRENIKRIEKVVRKLEEEVRKDLEEVRRVVKELREIVKRNK

SEQ ID NO: 20936 - protein, 56 aa, Artificial Sequence
  Synthetic
EEALRKVEEDLRRLDRRVEEVVTRSKEILDEARKSVEEVVRRSDEILRRVEEDLRR

SEQ ID NO: 20937 - protein, 60 aa, Artificial Sequence
  Synthetic
DEVEDILRKVEEIVKKSITDARRLLKEAREIVEESIKTAEELLRRNEDIVRKLSEDVKRT

SEQ ID NO: 20938 - protein, 55 aa, Artificial Sequence
  Synthetic
KRVLEKIKKVVDDSVRVNREVLKRVEEVLEESKRVNEKVEEDVRRVHEEVRKEIK

SEQ ID NO: 20939 - protein, 60 aa, Artificial Sequence
  Synthetic
DRVEKLLEDAKKIVEDSKRTAEKLLRENEKIVEKIKREADKILEDNKKIVDELAEAVKRT

SEQ ID NO: 20940 - protein, 55 aa, Artificial Sequence
  Synthetic
RRVLEEVKRVIDESRRVNKRVEEEIRKVHRDVERRLEEVLKRVRDTSEDVRRKIK

SEQ ID NO: 20941 - protein, 60 aa, Artificial Sequence
  Synthetic
SEAEKLLRDVEREVERVIEDADKLLREIEEIVKRSEDKAREILKENEKIVRELKEAVRRT

SEQ ID NO: 20942 - protein, 55 aa, Artificial Sequence
  Synthetic
EEVLRRIKKVVDDVRERLREVEKRIRDVIDRSRRVNERVLREAERTSREVERAID

SEQ ID NO: 20943 - protein, 59 aa, Artificial Sequence
  Synthetic
DEAEDVLRKVRERVKESERHVEKVLEDVRRVVKKSIDHARDVLRKVKEVIDRVRELVER

SEQ ID NO: 20944 - protein, 55 aa, Artificial Sequence
  Synthetic
ERVEREIRRVLKRSKERLEEVVKEIRELSEKSRRVLEEVKKRIREVLERVRKDVE

SEQ ID NO: 20945 - protein, 59 aa, Artificial Sequence
  Synthetic
REAEEVLKEVRKAVEDSIRHVEEVLEEVKKVVEESIRHIRDSLRDVRRVIEEVDRLVKR

SEQ ID NO: 20946 - protein, 55 aa, Artificial Sequence
  Synthetic
KRVKEEIDRVLDESKRVLEEVVTRIRKVSDDSEKEVRRVHKESKRVVEEVERTVD

SEQ ID NO: 20947 - protein, 60 aa, Artificial Sequence
  Synthetic
DEAEDVLRRVREMVERSIEHVRRVLKEVEDVVRESIKHVEDVVREVREVIREVEELVDRN

SEQ ID NO: 20948 - protein, 55 aa, Artificial Sequence
  Synthetic
KRVEEEIDKLLRESKRELDEVRKRIEDLSRESERRLREAVEEIRRLVKKVAEKVN

SEQ ID NO: 20949 - protein, 59 aa, Artificial Sequence
  Synthetic
KEAEDVLDEVRKAVEESIKHVKRVLEEVEEIVRRSIKHARDSLRKVKEVIDKVRTLVRR

SEQ ID NO: 20950 - protein, 55 aa, Artificial Sequence
  Synthetic
ERVRREIKRLLDESREVLKEVTKRIRKVSRDSERVVEKVHRDSKDVLDKVREDVR

SEQ ID NO: 20951 - protein, 57 aa, Artificial Sequence
  Synthetic
SSLEKAEDEVRELLRDVERVLKEVRDRIEELNRKVNEVLRRVIEESERLLREVLERV

SEQ ID NO: 20952 - protein, 59 aa, Artificial Sequence
  Synthetic
SEKVRRLVDKVRETVTDIVRRVTRLLEESEESVRRLIEKVKKLNEESRRIVEKIEKDAR

SEQ ID NO: 20953 - protein, 57 aa, Artificial Sequence
  Synthetic
SELERVEEDVKRVNKEVNDTLEKVIRDSKRVLDEVEERTRKVKRDSERLLERVERAV

SEQ ID NO: 20954 - protein, 59 aa, Artificial Sequence
  Synthetic
EEVVERVLEESRRSVETLIRDVERVNKKSREAVERNIRRSTAANERSKKIVKEIIDTAK

SEQ ID NO: 20955 - protein, 59 aa, Artificial Sequence
  Synthetic
DEAEDVVRRVREEVERLIRRSREVAEESKRTVDKLRRELEELLRRSRETVERIKKLIDE

SEQ ID NO: 20956 - protein, 55 aa, Artificial Sequence
  Synthetic
DKVREDIERVLREVEEVDKEVKERVRKVDEDSKKEIKEVKDEIRRVDEESRERAE

SEQ ID NO: 20957 - protein, 59 aa, Artificial Sequence
  Synthetic
DEAEKVLEKARDLVRRNIERSRRVLEENKKSVDDLIRRNEETNRRNEKSVDEVKKLVDN

SEQ ID NO: 20958 - protein, 55 aa, Artificial Sequence
  Synthetic
DDVLREVKRVLDEARRVSEEVEKESRRVLEEAKRVAEEVHKRSKKVVDDVKERAR

SEQ ID NO: 20959 - protein, 61 aa, Artificial Sequence
  Synthetic
SELEDVKRRIDKVVREVEEVVREVSERSKKVLEEVRRSAERVNREIERVLREAKDEVRRRT

SEQ ID NO: 20960 - protein, 56 aa, Artificial Sequence
  Synthetic
AKRVLEEARKIVDRLRKIVEEVVRRSEELIRRLKKINEDSLRRVEELVKDLIREVS

SEQ ID NO: 20961 - protein, 60 aa, Artificial Sequence
  Synthetic
KEAEEVVERVRELIERLRRRVTEMLRESKRLVEENIKRSEDALKESERLVDKLRELVKRT

SEQ ID NO: 20962 - protein, 55 aa, Artificial Sequence
  Synthetic
DKVLRTIEKLLDDVKKEVEKVNEDSKRLLRDVERVSKEVNDESRRVLEEVKREAK

SEQ ID NO: 20963 - protein, 59 aa, Artificial Sequence
  Synthetic
SELEKIVEKIKRIIDESRRTVEESVRKSEKIVEEVKKRLEELVEEVRKIVEEIVRIIRN

SEQ ID NO: 20964 - protein, 58 aa, Artificial Sequence
  Synthetic
EELEKVKRMVDKVVDDVRKVNDTSRKRSKETLEEARRKVEEVKRRIDKVLRDVKREID

SEQ ID NO: 20965 - protein, 60 aa, Artificial Sequence
  Synthetic
DEVEEVVKRVKEVVEKIVRELEKLVEESKKIVEDAVREDERLVEKIERVVRRLVEEVRRS

SEQ ID NO: 20966 - protein, 55 aa, Artificial Sequence
  Synthetic
EEVKKLVDEVVKEVEEVIKRVEDLDRRVLEENRESTRDVERRVREVVKRVREALK

SEQ ID NO: 20967 - protein, 59 aa, Artificial Sequence
  Synthetic
SDAERVVREVERLVDTTRKLVKKVVEDIRRVVETAKRDLDRVVKRSEDVVREVKKLIEE

SEQ ID NO: 20968 - protein, 55 aa, Artificial Sequence
  Synthetic
DRVIKLVRKLNKDSERKLREVRDRVERVIEEVEKRLREVKERSKETIEDVERARK

SEQ ID NO: 20969 - protein, 59 aa, Artificial Sequence
  Synthetic
DEAEKVVEEAKRRVKEVVERLREVADRNRRSIEELVKELRAVVEDSRKSVEDLVRRVRN

SEQ ID NO: 20970 - protein, 55 aa, Artificial Sequence
  Synthetic
EEVKKLVEDVIEEVRKVVKEVEDISRRVIEDLKRVLEEVEKRSRKLIKEARDETR

SEQ ID NO: 20971 - protein, 59 aa, Artificial Sequence
  Synthetic
DELREVVKRVRRLIEEVRRLVKELVDRVRKVIEELKRRSEDSARESERVVREIKKLVEE

SEQ ID NO: 20972 - protein, 58 aa, Artificial Sequence
  Synthetic
EELEDVDRDIERVREEVKRVVDEVRKRIRDVLEDARRESKRVLDRSRESLREVREAVR

SEQ ID NO: 20973 - protein, 59 aa, Artificial Sequence
  Synthetic
DELEELVKRVEDVIREIEERVRRLVRESERVVKEILKKSRKSVEKVKEVVDRAVDLVRK

SEQ ID NO: 20974 - protein, 58 aa, Artificial Sequence
  Synthetic
ERLKDVEREIRRVLRRAEKVVDEALKRSRDTLREVRKVSKEVREDIERVVKEADEAAR

SEQ ID NO: 20975 - protein, 56 aa, Artificial Sequence
  Synthetic
SVVDRVREELEKVLRHSKKVVEDVKREIDKVLKRSEDALRRVEEESKRVLEEVERD

SEQ ID NO: 20976 - protein, 59 aa, Artificial Sequence
  Synthetic
KDTLKKLVEEARKVSEDSRRRLERIVEEMRRVSEDSRRRLEEIVRENRKVVEEVRRRAT

SEQ ID NO: 20977 - protein, 56 aa, Artificial Sequence
  Synthetic
SVVERVREEIKRVLENSKRAVDKVREDIKRVLDESRKAIKEVEDEIRKVLEEVERG

SEQ ID NO: 20978 - protein, 59 aa, Artificial Sequence
  Synthetic
SDTVRRIVEEIEKVSRESVKRLEDIVREMKKISEESKETVDRIVEKIREVVKRLLEAAK

SEQ ID NO: 20979 - protein, 56 aa, Artificial Sequence
  Synthetic
SAVETVRKTIEDVLRNSERVLKKVREDSKKVLENSERVLKEVEDRSKEVLKEVEDG

SEQ ID NO: 20980 - protein, 59 aa, Artificial Sequence
  Synthetic
KKELDEIAEEIKRVSEDSVRKARELAERNKKVSDESVKRVKKIVRENEKVVEELLKAKK

SEQ ID NO: 20981 - protein, 60 aa, Artificial Sequence
  Synthetic
SEVDEIVRRIKEISKRSVDDLEKLARDNKKAVEEVLEELRKLLEENEKMVREVLEEVRRS

SEQ ID NO: 20982 - protein, 55 aa, Artificial Sequence
  Synthetic
ERLDRMLKEVIKHSEKVVRDVEETSKTVLKEIEDALKKVEEASKRVVDRLEEATR

SEQ ID NO: 20983 - protein, 60 aa, Artificial Sequence
  Synthetic
RRVDEIAKKIKRISEESVKTLDKIMEDARKIVKDVLDELRKLAEDNKRVVREVLERVRRS

SEQ ID NO: 20984 - protein, 55 aa, Artificial Sequence
  Synthetic
ERLRRTVERVIRHSREAVKRVKDEVEKVVKELEDVVRKVKEDSERVVKEVEEAKR

SEQ ID NO: 20985 - protein, 59 aa, Artificial Sequence
  Synthetic
SEAEDVVRRSKRSVERLKKELDDVVRESKESVERLVRRNDEVVKRSRESVDELTEAVKR

SEQ ID NO: 20986 - protein, 59 aa, Artificial Sequence
  Synthetic
KDLVERVERTVRTTLKELEDALREVKRMVEDTLKKAEDVNRRVAEEVKKSEKRLRDVAK

SEQ ID NO: 20987 - protein, 59 aa, Artificial Sequence
  Synthetic
DEVDDVVRKSEKSVEELVRKLETVVKRSEESVRELLEKNREVVERNERSVRELLERLEK

SEQ ID NO: 20988 - protein, 59 aa, Artificial Sequence
  Synthetic
KDLLKRVEDTARRVNREIEEALDRVRKAVEKTLKKLKDVNDEVRKESEKVLKELRDATK

SEQ ID NO: 20989 - protein, 61 aa, Artificial Sequence
  Synthetic
SDEDRVREMVRTVIEKLDRVLEEVERDSAKTDRDNKKSAEDVRRESKRTDDELKDVVRKAG

SEQ ID NO: 20990 - protein, 56 aa, Artificial Sequence
  Synthetic
VDEVVERAKKLVKRLEDRLREVVKESRRLVRRVVERNREVAERSKDLVRRLVEDTR

SEQ ID NO: 20991 - protein, 60 aa, Artificial Sequence
  Synthetic
SKEEEVERRVEEVIKELEEVLRRVEEEIKRVIDDNRRSARDVEEKSKRTDEELKDVVRKA

SEQ ID NO: 20992 - protein, 56 aa, Artificial Sequence
  Synthetic
VDEVARRVKEMVERLRKLAEEVVREAERVVREVVDENRKVVEESKRLVKELLERVK

SEQ ID NO: 20993 - protein, 60 aa, Artificial Sequence
  Synthetic
SDEERVDEEIKTVIEELKRSLKEVEDTIRKVIKENKDSAKRVKETSEKTDREIEDVVRKA

SEQ ID NO: 20994 - protein, 56 aa, Artificial Sequence
  Synthetic
VDTVAKEVRDLVRENVERNKEVVKRAKKVVDDVVRENRKVAEDSKKLVKEVKDRVR

SEQ ID NO: 20995 - protein, 61 aa, Artificial Sequence
  Synthetic
DDEERVKELIKEVIRELEESLRRVKEDSKRTDEKNKKSMEDVERKIERVRRRLDEVVKEAG

SEQ ID NO: 20996 - protein, 56 aa, Artificial Sequence
  Synthetic
VDEVAKRATDIVKRNAELNKEVVDESRRLVEEVVDRNEKVAKRAEEIVDELERRTR

SEQ ID NO: 20997 - protein, 60 aa, Artificial Sequence
  Synthetic
DEFKEVVDRVKRLVTENVRENRRVVEESERLVKEALKRLEDLVRRAKEIVDRLDDLVRKI

SEQ ID NO: 20998 - protein, 59 aa, Artificial Sequence
  Synthetic
KDLLKRVRDSIETVKKELDDSMKKVSDDDERSKKELEDVLEEVRKRIEKVMKELRDTSR

SEQ ID NO: 20999 - protein, 60 aa, Artificial Sequence
  Synthetic
DEVREIVREVKRLVEENVRRNDDVARKSRKLVKENKDRNKEVVDRLRELVKRALDEVRRI

SEQ ID NO: 21000 - protein, 59 aa, Artificial Sequence
  Synthetic
EKLLKEVEDMIRTVKKELKDSARRVSEEDKRSKEDLKRSAKEVEETIKDVLRKLDTETT

SEQ ID NO: 21001 - protein, 60 aa, Artificial Sequence
  Synthetic
DEAEEVVRRVERLVKENVKLNKEIVKRSRDLVKELEERLREIVKRVEEIVKRAKDLVEEI

SEQ ID NO: 21002 - protein, 59 aa, Artificial Sequence
  Synthetic
KDLLKRVREVIERVDRELDKSMKEVHDENEKSVRRLREVLERVKKRIKDVTKELEDRTR

SEQ ID NO: 21003 - protein, 60 aa, Artificial Sequence
  Synthetic
SLVEEVVRRVEDLVRKNVRLNEEIVRRSEDLVRRNVELNEELVRRAEDLVRRIEELVKKI

SEQ ID NO: 21004 - protein, 59 aa, Artificial Sequence
  Synthetic
EELLRKVEKMIERVVRELKKSAKRVHDENRRSDEDAERSMERVERVIERVERDIDRRLR

SEQ ID NO: 21005 - protein, 60 aa, Artificial Sequence
  Synthetic
DEAREVVTEVKRLVRENEERNKEVVKRSKKLVEDLKDLARKLVDRAKKLVDTLRDLVRKI

SEQ ID NO: 21006 - protein, 59 aa, Artificial Sequence
  Synthetic
ERLLEDVERKIETVIRELRKSMEEVKESSRRSNEELKKVADDVERTIRKVERELEKEST

SEQ ID NO: 21007 - protein, 60 aa, Artificial Sequence
  Synthetic
SDAERVVDDLERRVRENLEDLRRAVREVREVVKKNLETITRVLEEVERVVDRLSKLVKEG

SEQ ID NO: 21008 - protein, 55 aa, Artificial Sequence
  Synthetic
REVDKVLKDVARKVEEANEKSRRVLEEVEELVERVNRELHETLKRVAERVKRDAT

SEQ ID NO: 21009 - protein, 60 aa, Artificial Sequence
  Synthetic
SDEERVTKVLEEVKERIERANRTLEKRVREVTDRVREVNERSDKVNRDSERKIREIIKRL

SEQ ID NO: 21010 - protein, 55 aa, Artificial Sequence
  Synthetic
EKLVRDLRKIVEENERKNRDLLRKIEKIVEEIERRNRDVVRRSKESVERLREEVR

SEQ ID NO: 21011 - protein, 60 aa, Artificial Sequence
  Synthetic
DADRELRRVAKEVTDRSRRVLEDSERVVRESHEKSKRVLEDLRRVVKEVAERIDEVLKRV

SEQ ID NO: 21012 - protein, 59 aa, Artificial Sequence
  Synthetic
EEVARDVVRKLKRIVTENLKKNTKVVRDSEDLVRRDLEEVDRVVKKVKKDVDEIERDVK

SEQ ID NO: 21013 - protein, 59 aa, Artificial Sequence
  Synthetic
DEVREVVKELKRIVDELLDELRKVVEELEKIVTDDLRRIEEAVKRSKDSVEDLERRLKS

SEQ ID NO: 21014 - protein, 59 aa, Artificial Sequence
  Synthetic
KDLLRELEEVARRVEEKIKKAVRELEKVMREVNRKSTEVLKRLEKVVRDSEKRIDDATR

SEQ ID NO: 21015 - protein, 59 aa, Artificial Sequence
  Synthetic
SDVDEVVKEVKAIADDSTRLNKESAEKSRELVDRDTKKNKRSVEELRRLVTEILKVVES

SEQ ID NO: 21016 - protein, 59 aa, Artificial Sequence
  Synthetic
DELLRKLEEVVEKVRRDDERSHRESERVSRESTKRSRDSHRESREVVTEVKKEVDRAAK

SEQ ID NO: 21017 - protein, 60 aa, Artificial Sequence
  Synthetic
DEAEEVVDRARKLVKESEDLNRRSVEESEKLVTTSTELNKRTVDRLREIVEEVKDLVRKT

SEQ ID NO: 21018 - protein, 59 aa, Artificial Sequence
  Synthetic
EDVLRKVKKTLEEVKRRDDEAMRRSHKKDDDSRKRDEESMRRSDEVVREVIEEVREAER

SEQ ID NO: 21019 - protein, 59 aa, Artificial Sequence
  Synthetic
DEIEDVVRKVEEMVKESKDRVDRNVEESRRIVTESREKVKDSVRRVEEVVKEIKKLAEQ

SEQ ID NO: 21020 - protein, 59 aa, Artificial Sequence
  Synthetic
DKVVKKVDDALKRVEKKDRDAIREVERVNREVEKDDERVLRDSERVLEEVRKRVEEVTT

SEQ ID NO: 21021 - protein, 59 aa, Artificial Sequence
  Synthetic
SEIDEVVERVRKAVEDSRKVVEDLIKTVEDAVREHERLVRRVVEEVDKLVEDIRKLLER

SEQ ID NO: 21022 - protein, 59 aa, Artificial Sequence
  Synthetic
ERMLRKVDEVIKRVAREDERVVKKLEDVLRDVKRRVDEASKEVDRRLKEVKKRVEKEAE

SEQ ID NO: 21023 - protein, 59 aa, Artificial Sequence
  Synthetic
KEAEEAAKRAEEAAKRHEDLAREAAKEAKRAADESRKAAEEAAKRAEKAARDIADLARK

SEQ ID NO: 21024 - protein, 59 aa, Artificial Sequence
  Synthetic
EKAARKAEDALRRAREIAKKASEDAKRALDEARKADEDAARKAEKALKEAEDAAREARR

SEQ ID NO: 21025 - protein, 63 aa, Artificial Sequence
  Synthetic
DEEEELKEVVREVAERVEEVNRKSERELDKARKDSERALEKLERVLREVAERVKRVLDEASKR

SEQ ID NO: 21026 - protein, 56 aa, Artificial Sequence
  Synthetic
VKDVIRELEEVVRRNTDLVRKVEEEIRKVVEESKRSIEEVIKRLRKLVDDIRKAIK

SEQ ID NO: 21027 - protein, 63 aa, Artificial Sequence
  Synthetic
DEREKLAEVVKRVAEDVKRMNKESREALKRVKEEVKRVNEKSEKVTREVKKEVERVIEEAKRT

SEQ ID NO: 21028 - protein, 56 aa, Artificial Sequence
  Synthetic
VEDVIRELEKVVEDNKRLVEKVVRDARKVVEDNKELVDRNVKRLEEVVREITKEIK

SEQ ID NO: 21029 - protein, 60 aa, Artificial Sequence
  Synthetic
RDVDELVRELRDVVRKVLETARDSVRELKRIVTESLRRAEDLVKEITDVVREVLDAVRRA

SEQ ID NO: 21030 - protein, 59 aa, Artificial Sequence
  Synthetic
REVVKKLRDVIREVKEDVERVLKEVRDVNREVNKIDKEAVERIRRVLDEVRKRVDEAAR

SEQ ID NO: 21031 - protein, 59 aa, Artificial Sequence
  Synthetic
KEIDDVVRELKEIAKRDEDKVRRVVEDLERVAREDLRKVREVVKELRRVVKTLLDLVRR

SEQ ID NO: 21032 - protein, 55 aa, Artificial Sequence
  Synthetic
KRLDDVLREVADIIRRSIRDLERVLEEVKRIIETSNDELRKVLKEVRETITEAER

SEQ ID NO: 21033 - protein, 60 aa, Artificial Sequence
  Synthetic
SEIDEMVRKLKEMARRDLETVRRVVERLRKLAEDDLRRVRKVVKKLKELAKDIVRLVEEG

SEQ ID NO: 21034 - protein, 55 aa, Artificial Sequence
  Synthetic
ERLRKVLKEVKDIIRKSNKELDEVLRDVERIIRESIEELRRVLEEVKKIIKEARD

SEQ ID NO: 21035 - protein, 59 aa, Artificial Sequence
  Synthetic
DEVDEAVRRLEEIVTRIEKDVDDVARRSEESAKEVEKAVRKVVEEHKKVAEDIRKLVED

SEQ ID NO: 21036 - protein, 59 aa, Artificial Sequence
  Synthetic
REVKERLKKVLDKVRKRIKRVVERLEEAARKSRKIIRDAKEELERVSREVEKVIRDVRR

SEQ ID NO: 21037 - protein, 60 aa, Artificial Sequence
  Synthetic
EEVKELVERLRDLVRESEKRVDEVVKRLEDLVRRNEELNRELVTRLRDLVRKLEEKVKDT

SEQ ID NO: 21038 - protein, 59 aa, Artificial Sequence
  Synthetic
KEMVREIKRVVDEVRKRDKEALDRLKKVIEEVRRKVKRSEDEARRVVEEVKRIVDRVET

SEQ ID NO: 21039 - protein, 60 aa, Artificial Sequence
  Synthetic
REVDDLVRRLEELVRRNEKKNEDVVRESKELADRSRKLVKELVKRLRELVKTVVRLVEET

SEQ ID NO: 21040 - protein, 59 aa, Artificial Sequence
  Synthetic
KELVRKLKKVVDEVRERIDRSTEEVRRVSKESKDIDKRAKEEIEEVLRDVEKKLRETAT

SEQ ID NO: 21041 - protein, 60 aa, Artificial Sequence
  Synthetic
DEFRDVVRKLEKLVEDITREAEEVVKISKALAEENKRLNDELVDRLRRLVEEVRKKVEDT

SEQ ID NO: 21042 - protein, 59 aa, Artificial Sequence
  Synthetic
KEVVKRVKDVVDRVRDEVRRVAEKVDRVSKESKRIIDESTKRAREVLERVRKRVEDERK

SEQ ID NO: 21043 - protein, 60 aa, Artificial Sequence
  Synthetic
SEVDDIARKLRDLVRRNKELNDEVVRRSEKLVKENKELNEELVRRLKELVDRLEDEVRRT

SEQ ID NO: 21044 - protein, 59 aa, Artificial Sequence
  Synthetic
KEMVKKLRKVVEEVRREIDDSMRKVKKVSEDSKRRIERSTEEIEEVAKRVADKVTDVER

SEQ ID NO: 21045 - protein, 60 aa, Artificial Sequence
  Synthetic
RELEEVVRELRKLVTEDLDRVRKSVEESERVVREDERRVDESVKRTREIADEVRRLKEEG

SEQ ID NO: 21046 - protein, 55 aa, Artificial Sequence
  Synthetic
EELKKVLKEVRKVVTDSERRDKEANRKVEEVIRRSKKKDEDAHREVRKVVEDVRT

SEQ ID NO: 21047 - protein, 60 aa, Artificial Sequence
  Synthetic
SKDEKLEKVIREVKRVIERVSKESEDVLRKVRKVIEDVSRESRRVLEDSRRVLERVAREG

SEQ ID NO: 21048 - protein, 56 aa, Artificial Sequence
  Synthetic
VDEVVDRARRIVDDVDRLNREVVKRLKDLVEDLRRLNEEVVRRNKELADTVRKDVR

SEQ ID NO: 21049 - protein, 60 aa, Artificial Sequence
  Synthetic
SEDEKLKEVVDEARKILEDADRELKRVVKEVEDVIRDVSKKSTEVRKEVKEILKEAADKG

SEQ ID NO: 21050 - protein, 56 aa, Artificial Sequence
  Synthetic
VDKVVDDLRKLAEDLLRENKEVVDKLRELVERVKKLNEDVVREARRLADEVLKRVT

SEQ ID NO: 21051 - protein, 60 aa, Artificial Sequence
  Synthetic
SEVERLEERLKRIVEDIKRLVKKSVEDSRKIVEEIRKLVKDSVEKNKRSVEEVEDIVRKD

SEQ ID NO: 21052 - protein, 55 aa, Artificial Sequence
  Synthetic
ERVKRVLREVEERVKEVKKENEKAHEEVRKDVERVLEDDDRALRESRERAERVKK

SEQ ID NO: 21053 - protein, 60 aa, Artificial Sequence
  Synthetic
TEVDELLDSLRKIVTEIEKLVEESEKRLREIVKTIEKLVKDSVRTLKKIAREIEELAKDR

SEQ ID NO: 21054 - protein, 55 aa, Artificial Sequence
  Synthetic
ERVEKVLREVRDRVKKVNKRNEDALREVDKKVKDVNKENEDVLEEARRVVEEVRR

SEQ ID NO: 21055 - protein, 60 aa, Artificial Sequence
  Synthetic
REDEKIKKVVEEVRKKLEDVDKNSRDAIEDDKRVNKEVDRNSERAFKENEDEIRKVKEAG

SEQ ID NO: 21056 - protein, 56 aa, Artificial Sequence
  Synthetic
ADEVVKELERIVAEVEKLSREVVKRLKENVKRVRDLSKRVVEYLKEDADRLKEDVR

SEQ ID NO: 21057 - protein, 59 aa, Artificial Sequence
  Synthetic
DEERKIRKAVEDVRRVIKEVEENSKRVFDENKKVIDDVRKEVEKVLKENRDVIKEVRDK

SEQ ID NO: 21058 - protein, 56 aa, Artificial Sequence
  Synthetic
ADEVLKELKKLVEELEKLSREVVKYLREDAKRLKDLVRKVVEYLKEDARRLDEEVR

SEQ ID NO: 21059 - protein, 57 aa, Artificial Sequence
  Synthetic
SVVEKLLEDARRVVEKVREAVERNLKKVRDLVKKLREDVKRSKDHLEEVVRKLEEAK

SEQ ID NO: 21060 - protein, 59 aa, Artificial Sequence
  Synthetic
EEVERRVEEVIRDLERVLREVRERVRRINEESRRMLEDVERESRKALRDLEEVLDRVRR

SEQ ID NO: 21061 - protein, 58 aa, Artificial Sequence
  Synthetic
SVVEELRKRVEDVVDEVREVVERNRDLMRRVAEESKKIVDDSLRHIKEVVDEVRRAKN

SEQ ID NO: 21062 - protein, 59 aa, Artificial Sequence
  Synthetic
ERVKKRVRDVLRKLREVLERVAEEVKKVNKRSREVNKRVEEKSEEVLRDLERVLREVET

SEQ ID NO: 21063 - protein, 59 aa, Artificial Sequence
  Synthetic
SEVEEVVERLRRKAEEDLRRVEEAVKEHRRVVKEDLDRVRDAVERHREVVETIRKLKED

SEQ ID NO: 21064 - protein, 55 aa, Artificial Sequence
  Synthetic
EKLKRVLKEVEEVVRESKERLREVHEEVRKVIEDSKRILKTVHDDVRRVIEEVKK

SEQ ID NO: 21065 - protein, 59 aa, Artificial Sequence
  Synthetic
DDVERVLKELDELLKRDETEVREVEKRHREVLETIERRVREVIERHKEMLRRLAELVRS

SEQ ID NO: 21066 - protein, 55 aa, Artificial Sequence
  Synthetic
EELKKVRDKVRRVIEESKRRLEELHEEIRRLITELKRRLEEVTEEIKRAIDELRR

SEQ ID NO: 21067 - protein, 59 aa, Artificial Sequence
  Synthetic
DEVEDVVRRLRKIVEDIRRDVERVVEEHDRVVRKLKRRVEEAVEEHRKVLEEIKKVKEN

SEQ ID NO: 21068 - protein, 55 aa, Artificial Sequence
  Synthetic
EDLKRVLKEVEDVVREVDKILTDATERVKRVITEVKDILRRVHEEVREVIKRVKE

SEQ ID NO: 21069 - protein, 59 aa, Artificial Sequence
  Synthetic
DEVEEVVRELREILKRDLDEVRKAVEDHERLLREITKDVKRVADRHRDLLRKIRELKEN

SEQ ID NO: 21070 - protein, 55 aa, Artificial Sequence
  Synthetic
EKLKRVLKELEDVIRESEEILERVTRKAERVIERVRKILEEATKEVERVIREVRR

SEQ ID NO: 21071 - protein, 55 aa, Artificial Sequence
  Synthetic
EEDERIEKVTEEVKKVIEDVTRLTETVMRESEKVIEDVTRDSDRVRKEVKKVLEK

SEQ ID NO: 21072 - protein, 56 aa, Artificial Sequence
  Synthetic
VDEVVKRLKELVTRLAEENKRAVDTNRKLAEDLKELNRKAVEELKELLRRVDERDR

SEQ ID NO: 21073 - protein, 56 aa, Artificial Sequence
  Synthetic
SEDEEIDRVDKDVKRVSDTSNKILDDVEKEVDKVIREVTAESKKVLDEAKKVLDKV

SEQ ID NO: 21074 - protein, 56 aa, Artificial Sequence
  Synthetic
VEEVVRRLEKLVDDDRKLVEKVVKELRELLKELRDKNKEVVDELRRLAKTVDEEDR

SEQ ID NO: 21075 - protein, 60 aa, Artificial Sequence
  Synthetic
SAEEIAERVLRELRKVTKEVAEEDERVLREDEKVTDEVRKEDKRVLDEARKVIDDVRKKG

SEQ ID NO: 21076 - protein, 55 aa, Artificial Sequence
  Synthetic
EEVVKRVRENVKRTRELSKRSVEKNEENVRRTREMSKRTVKEIRDVVKELRDRVK

SEQ ID NO: 21077 - protein, 59 aa, Artificial Sequence
  Synthetic
SKREKAEEVLKEAKKVIDDVREKDRRALEEDKRVTDEVARIAEKVLKDLRDVIEEVRER

SEQ ID NO: 21078 - protein, 55 aa, Artificial Sequence
  Synthetic
EEVVRRVRKVVTELEELSRRSVEENRRNAEETERLIREIVERARRVVETLKETVR

SEQ ID NO: 21079 - protein, 59 aa, Artificial Sequence
  Synthetic
SVEDILRKVAKEAEDVAREVTRILEEANRRVEEVVKRVKEENERANEKVERVVREVKAR

SEQ ID NO: 21080 - protein, 59 aa, Artificial Sequence
  Synthetic
EEVVRRVVETVKDIVKRLRDIVREVLKKNERIVEELKKTSDESKKRNDDIVRELDERAR

SEQ ID NO: 21081 - protein, 59 aa, Artificial Sequence
  Synthetic
SVEEILEEVLRRAEKIVKEVKDLDRRALEENKKAIKEVADELRKVDEEVKKVVDEVRRE

SEQ ID NO: 21082 - protein, 59 aa, Artificial Sequence
  Synthetic
EDVVRKVVRDVEDIVRRMREEVRRSVEDLKRNADENRDEVRKVVKENKDIVREMRERVR

SEQ ID NO: 21083 - protein, 59 aa, Artificial Sequence
  Synthetic
REKEKLEKAVRDARRVIERVERKDREALKEVERVVRESHKTLEDVLREIRKVATEVRRE

SEQ ID NO: 21084 - protein, 56 aa, Artificial Sequence
  Synthetic
VDKLMKTIEDLLRRVEELVDRSVKELKRLLDENRKLVKRVLEEIRRILKELRDEVK

SEQ ID NO: 21085 - protein, 59 aa, Artificial Sequence
  Synthetic
DEEEKLRKVKKEADDVIRRSHEEDERVLREVEKVVRESHEELKRVADEIRRVVEEVKTR

SEQ ID NO: 21086 - protein, 56 aa, Artificial Sequence
  Synthetic
VDKVMETIRRLVTKNRELVKRSVDELRDLVDKNRKLVERVVERIEEIAKKARDDVK

SEQ ID NO: 21087 - protein, 60 aa, Artificial Sequence
  Synthetic
KVVEEIEKEVRRSVEELERLVTEDLRKVKEVVKRAEEVAEEDERKVDEVVKELKRAAKEG

SEQ ID NO: 21088 - protein, 59 aa, Artificial Sequence
  Synthetic
EEMERRVREVLKRNEDVTDEVKKKIEESNRDLEDALRKVEKKIRESNERLRRVLEEVRK

SEQ ID NO: 21089 - protein, 60 aa, Artificial Sequence
  Synthetic
KEVEDVLDDVRRVVEKLEREVKKVEDTNERVVETLDEIVKEIRDRNRKVVETLKEIMKSN

SEQ ID NO: 21090 - protein, 55 aa, Artificial Sequence
  Synthetic
DKLRKAEKDLRDVAKEVRDKIRRADERLKRVIERVADEIRKVNTDLKRVADEVRK

SEQ ID NO: 21091 - protein, 60 aa, Artificial Sequence
  Synthetic
SEVEDVEREIEEVVEELRKIAEDDLRRNDTVVKEVRELVKRDREKNRKSAEELKKLKEEG

SEQ ID NO: 21092 - protein, 55 aa, Artificial Sequence
  Synthetic
EELKRVMEKITRVVEKVKEDVDRSKKKAEEVIREVEERLKRSLDESRKVLEEVKK

SEQ ID NO: 21093 - protein, 59 aa, Artificial Sequence
  Synthetic
REVEEVKKRVDEVVKRLRKLAEDDDRKNKESADRLRAIVDRDKKENTRSMETLRRLRER

SEQ ID NO: 21094 - protein, 55 aa, Artificial Sequence
  Synthetic
ERLEDAKKKLEDVIDEVRRRLEESNKRSRDVMEEVRKEVRRSLRESEEVVKDVEK

SEQ ID NO: 21095 - protein, 60 aa, Artificial Sequence
  Synthetic
DEVREIKRLVDELVKRLKELAERSRRLVDEVAKRSKELAKENLDLNEDIVRRLDEVAKRG

SEQ ID NO: 21096 - protein, 55 aa, Artificial Sequence
  Synthetic
KELKDVAREIERVLKEVEEEDDDALRKIEEVSKRSKEIIDESMEKVKKVMEDVTR

SEQ ID NO: 21097 - protein, 59 aa, Artificial Sequence
  Synthetic
SEVETVKKLIEDIVRESRRLVRENEELNKDVIRRSEELVRRSKEAVKRLVDKLDELRKR

SEQ ID NO: 21098 - protein, 55 aa, Artificial Sequence
  Synthetic
RELERAVEEIERVSRDSKREIKRSTEEVRKASERSRKEDEELERRARRVVEEVKR

SEQ ID NO: 21099 - protein, 59 aa, Artificial Sequence
  Synthetic
SELEKVVEEVEEIVRRSERHVTEVVKTSKKSVEDSNRHVAKVVEDVKKKVTELIEAARE

SEQ ID NO: 21100 - protein, 55 aa, Artificial Sequence
  Synthetic
KVLERVKRELKKAADRSRDIIRRVARETEEALRTSREIAKRVEDELRRVLEEVRK

SEQ ID NO: 21101 - protein, 59 aa, Artificial Sequence
  Synthetic
KELEDVVKRVREEVRRSLEHVAKAVKESEDSVRELKEEVDRVVKESEDIVRELEKLKRE

SEQ ID NO: 21102 - protein, 55 aa, Artificial Sequence
  Synthetic
KRLKEVDKELKRALEESRKIIKKVKEETKDVLRRVRDILRRSVRTSEKVLKEVKD

SEQ ID NO: 21103 - protein, 59 aa, Artificial Sequence
  Synthetic
SKVERVVEESRENAKRDLDRVDKVVKDSRRSVEEDLKEVRDVVKEVDDMLREAEELMRR

SEQ ID NO: 21104 - protein, 56 aa, Artificial Sequence
  Synthetic
EKVIREVAKESEDAFRESERRLREVLKRSAEALKRSRDILKTVRERVKRVIDEVRR

SEQ ID NO: 21105 - protein, 60 aa, Artificial Sequence
  Synthetic
REVEEVVKRSEKSVKEMEDKSRETVKKSRKSAKEDIDKVEEVVRRVEKVLREAKKLADDG

SEQ ID NO: 21106 - protein, 56 aa, Artificial Sequence
  Synthetic
KDVIEEVRKKSDEVLKRVRKINKEVTEESERAFDESRRILETVAREVKRVIDEVRR

SEQ ID NO: 21107 - protein, 59 aa, Artificial Sequence
  Synthetic
DAVEREVRKAEKIVEDDLRRVAKVVDESRKSVEKNEEDVRRVVEELRKILEEIDRLKRN

SEQ ID NO: 21108 - protein, 56 aa, Artificial Sequence
  Synthetic
ERVLRRVKKKLEDAVEDSRRILTELAEEVKTVVERSKRILDTVRDELKKALERVKK

SEQ ID NO: 21109 - protein, 60 aa, Artificial Sequence
  Synthetic
DEVDEVVEKLRRLLEDTIRLVREAVDYLRRNLEDLRRKIREIVERLKRLLEELRKLVKDT

SEQ ID NO: 21110 - protein, 56 aa, Artificial Sequence
  Synthetic
EKRVRDAADEVRRMNEEVKKIIDDARKELERVHRDVKREIDRVARELDEEIRRVEK

SEQ ID NO: 21111 - protein, 60 aa, Artificial Sequence
  Synthetic
DEVREMVKTLTDLLRRNRELVKRVVEELRKLLEETRKLVEDMVKELEDLLRELEKLARDT

SEQ ID NO: 21112 - protein, 56 aa, Artificial Sequence
  Synthetic
EKVVEEVARKVARANEDSNRILDEARKEVEKVNEEVRRIIKEVTDRLEKKVREVEK

SEQ ID NO: 21113 - protein, 59 aa, Artificial Sequence
  Synthetic
SKAERLDEEVDKIVRDLRRLVDELEKRIEKIVRDNRELVKRVRESNKRIVETLRRLKEN

SEQ ID NO: 21114 - protein, 56 aa, Artificial Sequence
  Synthetic
KREVDKIEKKLRDVVREVEEIVTRVDKRLKDVLKESREILKEVNDETKKVLDEVKT

SEQ ID NO: 21115 - protein, 59 aa, Artificial Sequence
  Synthetic
SEAEKVVRDVREIVERLRDIVRKVVEENEEIVKRLRKLVTDLVEENKRTVEALRDLKRR

SEQ ID NO: 21116 - protein, 56 aa, Artificial Sequence
  Synthetic
EEILRRVEEEARRAAKEVEERIRTVNRRTEKVLEEVRKIVKDATDTSEKALREVRE

SEQ ID NO: 21117 - protein, 59 aa, Artificial Sequence
  Synthetic
SRVEEVLRKVEEIVKRNEDLARKVVDESRKTVDKLRTLVEKVLRESRETVKRLIDLVRR

SEQ ID NO: 21118 - protein, 56 aa, Artificial Sequence
  Synthetic
EDLLTRVTDVLRKLRDRSREIIKRVVDETRRVLEEVKELIKRVLEETERVLREVRR

SEQ ID NO: 21119 - protein, 59 aa, Artificial Sequence
  Synthetic
SEVDEVVDRSRKTVKKMIDDVREVLERSRKNVKEDIERVRKVVRESEETVKTARRLKEE

SEQ ID NO: 21120 - protein, 56 aa, Artificial Sequence
  Synthetic
EEVLRRVREVTERATREVEELLKRSDEESERALKTSTDVLREVLERSDKVEEEVKT

SEQ ID NO: 21121 - protein, 60 aa, Artificial Sequence
  Synthetic
KEVEEAVRRVEESVRRLEEEVDRVVKENRKLVKDLIELAEEVVRRVKELVDRLRETVRRA

SEQ ID NO: 21122 - protein, 56 aa, Artificial Sequence
  Synthetic
KDVVTEVKKRAEDVDRRVERVIEEAEEVSREALKRVRDIIDTVRKVAETVLKEVKD

SEQ ID NO: 21123 - protein, 59 aa, Artificial Sequence
  Synthetic
KEKEVMDEVERVLEKVKEDNRRVVREVEDVLRRVEKENKEIVDEVKDVARKVLEEVRRR

SEQ ID NO: 21124 - protein, 55 aa, Artificial Sequence
  Synthetic
ERVLEKVKDVVRRSRDIVRRILEDAKDVVRKSREIAKKILEEVTEVVKRAREKVK

SEQ ID NO: 21125 - protein, 60 aa, Artificial Sequence
  Synthetic
SKLEELLKRSEKSVREAKRLVEELKRRSEETVRRNKELAERLEDESRKTVELLKRIVDSN

SEQ ID NO: 21126 - protein, 55 aa, Artificial Sequence
  Synthetic
KLLEEVEKESRKVVEDVRRVIEDVKRRSDEALKESEDIIRDVRRKSEKALRDVEK

SEQ ID NO: 21127 - protein, 60 aa, Artificial Sequence
  Synthetic
SELEDLLRRSKESVDRLRELIRRLEDESRKTVETLRDIVKKLKEENKKTVDDLRDIVRRR

SEQ ID NO: 21128 - protein, 55 aa, Artificial Sequence
  Synthetic
ELLERVREVSDKVLEELKKIIDEIRKRSEKVAEEVKDVIRKVNELSKKVLKDVKK

SEQ ID NO: 21129 - protein, 60 aa, Artificial Sequence
  Synthetic
RKLEELLKRSERSVEELRRKVTRLLEENDDTVRRLRELVTKLTDDSRKTVTRLRDIVRKD

SEQ ID NO: 21130 - protein, 55 aa, Artificial Sequence
  Synthetic
KLLEEVTKVSEKVAEEVRRVIKTVNDKSTEVLREVKRVIETVRRESEDVLEKVEK

SEQ ID NO: 21131 - protein, 60 aa, Artificial Sequence
  Synthetic
SKLEDLLRRVTEIVKRLEEIVRKLEERSRRTVKRLEELVDTLRKENEDTVRRLEKIVRDR

SEQ ID NO: 21132 - protein, 55 aa, Artificial Sequence
  Synthetic
ELLKEVRDVLETVVKRVREIIEKVRKESEDALRKVDKDIREVNRRSEKALEDVKT

SEQ ID NO: 21133 - protein, 59 aa, Artificial Sequence
  Synthetic
SEAEKIEREVDKVVEDHRRLVRADLERVERVVEEHRRLVKEDLDRVDEVVKRLRKLKED

SEQ ID NO: 21134 - protein, 56 aa, Artificial Sequence
  Synthetic
EDVLRRVRELLKTVHEEVKKVIKTSDDILRTVHDEVRKVIKTSEKILREVAEEVER

SEQ ID NO: 21135 - protein, 59 aa, Artificial Sequence
  Synthetic
KELEDATREVETVADEHRRVLEEDKRDVKEVVERHRRLLEDLRRKLEKVVRDLRKLLKD

SEQ ID NO: 21136 - protein, 56 aa, Artificial Sequence
  Synthetic
EDVLRRIEKKLKDVTDDLRRVIKESKDRLTKLHKEVEDALRRLRDRLRELEDEIRR

SEQ ID NO: 21137 - protein, 61 aa, Artificial Sequence
  Synthetic
RELEEAVKEVEKKIRELRERLKEVVERSTKKMDDLRKENEKVMRESSELVTELVKEIKDRA

SEQ ID NO: 21138 - protein, 56 aa, Artificial Sequence
  Synthetic
LKDLRKKVDDVARKVDKILEDLERESDTVLDRVKKVLERSRRDSEDVARRVEEKVR

SEQ ID NO: 21139 - protein, 60 aa, Artificial Sequence
  Synthetic
SELDELRKMVKEVLDRVRDLLKKLEDEARKVAEDNKRLLERNKREIEAALRRVEEIIRRR

SEQ ID NO: 21140 - protein, 58 aa, Artificial Sequence
  Synthetic
KRVREVLREVEKRIKELEDLVRKVLDKIRELIERLKRETDKVLEESKKLIKELSERLE

SEQ ID NO: 21141 - protein, 59 aa, Artificial Sequence
  Synthetic
DELEDVRKEIEDVRKENEDTVRESKDEIRRLEDTNRKTLKESRDDIEKARERVKKERRD

SEQ ID NO: 21142 - protein, 59 aa, Artificial Sequence
  Synthetic
EKDVRKVLKEVEEEARELVKLNRDVLEELRRRVRKLVEDNKDVTREVEDILKKLEEELK

SEQ ID NO: 21143 - protein, 57 aa, Artificial Sequence
  Synthetic
SMDETIRKLAEDNRRRSDETVERIERLAKKLDEDNRRVVEKSERLAKEVADKVRRVK

SEQ ID NO: 21144 - protein, 55 aa, Artificial Sequence
  Synthetic
ERVIKEVEDISRDLERKNKEVVERARRIVEKVKETNKRVLEEVEKIVRKLKEELK

SEQ ID NO: 21145 - protein, 60 aa, Artificial Sequence
  Synthetic
SVEEVVEEVRRVAEKVEEDVTRVIKEDEDIARELEKRIDDVIKESKTVADELLERLRRAG

SEQ ID NO: 21146 - protein, 59 aa, Artificial Sequence
  Synthetic
EEELERLLREVEELIERVKERHKRLVEDSKRLLDEVDKRLKDSNREVRERIEEIKRRVD

SEQ ID NO: 21147 - protein, 56 aa, Artificial Sequence
  Synthetic
DELEKIREEVREIVERSKREAKELLDRNKEIVKDLERKAREILRENRDRVRRLAEK

SEQ ID NO: 21148 - protein, 56 aa, Artificial Sequence
  Synthetic
SEVLDELRRIIETSEKLNRDVLRESKEVNRDLTRKLEEVLRRSKEDNKRLSEKIKE

SEQ ID NO: 21149 - protein, 56 aa, Artificial Sequence
  Synthetic
DELEAIKDEVRRIVRESEERAKKILRDVERMLDEIRKKLKEILDRNREVVDELKRQ

SEQ ID NO: 21150 - protein, 56 aa, Artificial Sequence
  Synthetic
SEVLKELRRIIEESKRRNKRVLDEIRKRAEDLRRVIKEVLDRSREINKRLSDEIRK

SEQ ID NO: 21151 - protein, 56 aa, Artificial Sequence
  Synthetic
DELEKIVREVREIVKESKEEARRILEENKKIVEELRRRLRKILEENEDMVRKLEKK

SEQ ID NO: 21152 - protein, 56 aa, Artificial Sequence
  Synthetic
SRVLEELERIIRESEEANKKVLEDSRRVNKKLSEELKRVLDESRRRNEELSKRIKD

SEQ ID NO: 21153 - protein, 60 aa, Artificial Sequence
  Synthetic
DELRDLEREIRRIVEESERHLKEVLERNHEASKRNRDDLKRMVDDIRRKVEEVRKLREEG

SEQ ID NO: 21154 - protein, 60 aa, Artificial Sequence
  Synthetic
AETVDRVLEKLKRIVEDSERRVKEVLKELEENSKRIKDETKDVLRKVEEIVERLRKEIER

SEQ ID NO: 21155 - protein, 60 aa, Artificial Sequence
  Synthetic
DELEELKEEVKRAVDENRETNKRALDRNHEISKDSEDHLRESSERIRRRIEELARLVEAG

SEQ ID NO: 21156 - protein, 60 aa, Artificial Sequence
  Synthetic
RETVKKVLKELREEIERVKRESEKVVKAVRDNSKRSEEKVEEVLERNKRIVDDVLRKIKK

SEQ ID NO: 21157 - protein, 60 aa, Artificial Sequence
  Synthetic
DELKEAEDRVREVVRENEERLRKALEENHKISRDSEKHLRDLERTIKEIVKRVRDLRRRG

SEQ ID NO: 21158 - protein, 60 aa, Artificial Sequence
  Synthetic
KDTVEKVLRDLRRIIKEVKERSREVLKRVRENSDRSLKKVEEVLKRLEDIIRTVKEEIKK

SEQ ID NO: 21159 - protein, 60 aa, Artificial Sequence
  Synthetic
EDAERALKKIEEIVRRLTEELKRVLDANRESVDRLRRELEEVLKRNRELVRKLEKILEER

SEQ ID NO: 21160 - protein, 56 aa, Artificial Sequence
  Synthetic
REVVERLKKIIADLDRVVEEVIRTSRKVIKELEDTVRRVIEELKRVSDELKKKVED

SEQ ID NO: 21161 - protein, 59 aa, Artificial Sequence
  Synthetic
DKLEELLKRVEELVERLKEESERVLRRNHELSEKLRRILEEILKRNHDLSRDLEDRLRK

SEQ ID NO: 21162 - protein, 56 aa, Artificial Sequence
  Synthetic
DEVVKRVEDIIEKVREDLERSDEKLNDNVRRLEREVREVLKAVEDNARRLAEKTKT

SEQ ID NO: 21163 - protein, 59 aa, Artificial Sequence
  Synthetic
SEAEKLLEEVKDLVRRLKKDLERVLRDNHRLSEELRRRLREILEENKKLIDTLREIREK

SEQ ID NO: 21164 - protein, 56 aa, Artificial Sequence
  Synthetic
KEVAEKMRKIVEELRKEVEEVLKALKENLDRLRREVEKVVERIEDTLRELKKRATD

SEQ ID NO: 21165 - protein, 60 aa, Artificial Sequence
  Synthetic
SEAEKVLEEVKRLVEDIERKLREMLRRDNEISRKVRDDLRKILEENNELSRRVEEEIRRI

SEQ ID NO: 21166 - protein, 56 aa, Artificial Sequence
  Synthetic
EEVVEALEKVVRDVARRLEDVIRRVAENAKRLEDDLRKVEEELKENADRLEERAKK

SEQ ID NO: 21167 - protein, 59 aa, Artificial Sequence
  Synthetic
SEVEKLLEKLRELVERVEREARRILEENKELIKESLKRIRDLLEDNKRLIREVKEILRR

SEQ ID NO: 21168 - protein, 56 aa, Artificial Sequence
  Synthetic
KDVVKRIRDIAEKVRRDLKRVIDAVRDTSRESDRRLRDVIREVDESSRELVREIER

SEQ ID NO: 21169 - protein, 59 aa, Artificial Sequence
  Synthetic
SDMERLLRELEELVKELRERLRRLLEENKDLIRRSLDRARKLVRRIEELVRKVKEDLDR

SEQ ID NO: 21170 - protein, 56 aa, Artificial Sequence
  Synthetic
EDVLRKIEETARRLVKEIEDVIREVERTSRESDKKLEDVIDKLRKIVRKVLEELRT

SEQ ID NO: 21171 - protein, 59 aa, Artificial Sequence
  Synthetic
SEVEDLVRELERLVREAKKALDDLRRKLEELVRDSLRKAEELLKENHDLSREVKKLLED

SEQ ID NO: 21172 - protein, 56 aa, Artificial Sequence
  Synthetic
KKVADELRRIAKRLVEELERVIRELEKIAKESDERLKEVIDRLRENVERLVRELRR

SEQ ID NO: 21173 - protein, 60 aa, Artificial Sequence
  Synthetic
KELEDLDRDVRRVVEELREELRRLEEEDKRSVEENEERLERLERRLRKKVKELEEKRKRI

SEQ ID NO: 21174 - protein, 60 aa, Artificial Sequence
  Synthetic
REEVRRVLEELREKIKRVLEEIEEVLRRSREINKRLRDRTRTVAKRLKEIVDDVLRKVET

SEQ ID NO: 21175 - protein, 60 aa, Artificial Sequence
  Synthetic
RELEELLKEVEKAVRENTKLLKDLLDKDKKSVKENEETLRDLERKLREVVERLKRELKDI

SEQ ID NO: 21176 - protein, 60 aa, Artificial Sequence
  Synthetic
EKRVRDVLKRLREIIDTVKKVTKEVMERSEEINRRLLKRTKDVLRELEKIVKTVLDEVRK

SEQ ID NO: 21177 - protein, 56 aa, Artificial Sequence
  Synthetic
SEVDKVREDVKRLIEDAERVSDDVDRRVKRLAEALKETSDKVKEDVERLVRDIKRE

SEQ ID NO: 21178 - protein, 59 aa, Artificial Sequence
  Synthetic
EETLRRVLRKVEDVIRRNKEDNEKVLKDAKRVVEEDKRENEKALERIERIVRKLKEDTR

SEQ ID NO: 21179 - protein, 56 aa, Artificial Sequence
  Synthetic
SEAEEVVRRVEKLAEDIKRVIDKSLEDVERLVRDAKRRSREVLREVEKLVEDITRR

SEQ ID NO: 21180 - protein, 59 aa, Artificial Sequence
  Synthetic
EEILRRALEKVERVITENKKENEDALRDAKRKIDKDKEDNKKVLDDVRRIIEELKEETR

SEQ ID NO: 21181 - protein, 61 aa, Artificial Sequence
  Synthetic
DEVDRVAEEVKKLIDDVKRVSDEMLKRSEDLIREVKKTSDDVLETVERLIRDVERKVEERV

SEQ ID NO: 21182 - protein, 59 aa, Artificial Sequence
  Synthetic
DEVLKRLLDKIREDAKRNKDDNKRNLDESKKEVDRNKDENRRVLEKVKETVKRLKDEVK

SEQ ID NO: 21183 - protein, 61 aa, Artificial Sequence
  Synthetic
KEVEEMLKEVKKLIEKVKRRSDDVLRRSEELARDLKKMSDDVLREVKKLIDDVKRTVDERV

SEQ ID NO: 21184 - protein, 59 aa, Artificial Sequence
  Synthetic
REFLKEVLDRVRERVEENERRNDENLKKSKKRIDENKEKNERVLRKIREIARRLKEELR

SEQ ID NO: 21185 - protein, 61 aa, Artificial Sequence
  Synthetic
SEVDRVLKTVEELIRRVKRISDRVLTEVKKLVDDVRRVVEKSRRDVEELVKEVKRSVDERV

SEQ ID NO: 21186 - protein, 59 aa, Artificial Sequence
  Synthetic
KEMLERALKEIKEEVKRNEDDNRRMLREIEELAKRNKEENKRVLDEVRDIVRRLAEEVK

SEQ ID NO: 21187 - protein, 61 aa, Artificial Sequence
  Synthetic
EEVERVREEVDKLLKTLKEVSDRVLKASKDLLDRVKEIVEKSLRDVKRLIDDVKRKVDERV

SEQ ID NO: 21188 - protein, 59 aa, Artificial Sequence
  Synthetic
KEVLERLLKKAEEIIRKNKKENDDNLEESRKEIEKNEEDNRELVKRIEDEVRRLKKEVE

SEQ ID NO: 21189 - protein, 61 aa, Artificial Sequence
  Synthetic
SEVEEVLRRVRELIERVKRIVDESEKEVRRLIEEVKKIVEESLKRVEELLRDVKRRVDERV

SEQ ID NO: 21190 - protein, 59 aa, Artificial Sequence
  Synthetic
RKMLREVLEKIKKIVKDNEDDNRRALTEVRERVRENVEENKKVVDRVRKIAEDLRKEVE

SEQ ID NO: 21191 - protein, 61 aa, Artificial Sequence
  Synthetic
SEVERVLEEVKKLIEDVKRVVKESEEEVEKLIRDVEREVERSKRTVDELVKDVKRAVDRDV

SEQ ID NO: 21192 - protein, 59 aa, Artificial Sequence
  Synthetic
REVLTKVLREVEEAVRRNKERNKRALEEVKKTVDRNREDNKRMVDKVRETAKRLKDEVR

SEQ ID NO: 21193 - protein, 56 aa, Artificial Sequence
  Synthetic
SSIEKVREDVKELIRDVERAVKRVKEESKKLVDDLRRAVKRVEEESRKLLKDLERN

SEQ ID NO: 21194 - protein, 59 aa, Artificial Sequence
  Synthetic
DDDVRRVLREIERIVKEVKDDLKRVLEESERSIRRVKEELRRVLEDNRRLLKEVKDRAR

SEQ ID NO: 21195 - protein, 60 aa, Artificial Sequence
  Synthetic
SEVEAVLREVEERVDRVRKESEKTLREVERLVREAKRRSKKSLDDVKKKVEEVKKKIRDI

SEQ ID NO: 21196 - protein, 55 aa, Artificial Sequence
  Synthetic
EEVKREIEKLVEDVRRVSDRVVEEIKELVKDVERMSRKVVEDIKRLAEDVRREAE

SEQ ID NO: 21197 - protein, 60 aa, Artificial Sequence
  Synthetic
DEVERVLEEVKERVDRVKRESEKSLKEVEKLVRTNERLSERTLKEVRDLVEDAKKKIDDI

SEQ ID NO: 21198 - protein, 55 aa, Artificial Sequence
  Synthetic
EEVRREIEKLVEDVKRVSDKVVEDIRRLAEKLRRDNKRAEDEIRKLVRDVERRAK

SEQ ID NO: 21199 - protein, 60 aa, Artificial Sequence
  Synthetic
DDLERVLEEVRKLVKELKERSRKSLEDVRRSNERNETESRRTLREVRELVKKVKEVIDRT

SEQ ID NO: 21200 - protein, 55 aa, Artificial Sequence
  Synthetic
EKVKEDIRRLVEEVERVSREVVERIKKLADESRKKNKKVIDEIKELVKRVRDRAK

SEQ ID NO: 21201 - protein, 60 aa, Artificial Sequence
  Synthetic
REMEEVLKEVEKRVRDIEDESRKTLERVDKLVKKNKRDSERTLKEVEDLVREVKKEIRRI

SEQ ID NO: 21202 - protein, 55 aa, Artificial Sequence
  Synthetic
EEVKREIKKLADRVREVSERVVREIEKLVRDIKRRNEEVIDEIRKLVEDVKREAK

SEQ ID NO: 21203 - protein, 60 aa, Artificial Sequence
  Synthetic
KEVEDVLEEVKELVKELKRVSEETLRRVEKSNRENEEKSKTTLKEVEDRVERVKEEIKKT

SEQ ID NO: 21204 - protein, 55 aa, Artificial Sequence
  Synthetic
EEVKREIKKLVEEVRRVSEEVVREIKKLVDKSRRVNEKVIEDIKELAKEVEEAAR

SEQ ID NO: 21205 - protein, 60 aa, Artificial Sequence
  Synthetic
SELEEILERVRKMAEDAERISEETLRRSEELIRRVKDLSRESLERVERLIRKVKKEIEEI

SEQ ID NO: 21206 - protein, 58 aa, Artificial Sequence
  Synthetic
EEVLRVIKAIEDLLRRVERVSREASKTSEELLKDITRVSEKSKEDIKRLLDDVRRKVK

SEQ ID NO: 21207 - protein, 60 aa, Artificial Sequence
  Synthetic
SELDEVLKTVEELVRRIKEKLKEILDRSRKLVEEARKLSEDSLREVKRVIDEIKREAERQ

SEQ ID NO: 21208 - protein, 58 aa, Artificial Sequence
  Synthetic
EEVLKLVEDVRRLVEDVDRTVERMSRESKKLAEDIKRVSEKSKRDIERLLADVERTVR

SEQ ID NO: 21209 - protein, 60 aa, Artificial Sequence
  Synthetic
DELDEVLKEVEELIKRVKRESERTLKENRDMVREIKRRSEESLREVRELIERVKDELRRT

SEQ ID NO: 21210 - protein, 58 aa, Artificial Sequence
  Synthetic
ERVARVVRRVEELLEDVERRSREVLKEMDKTAKEVKKASEKSEEDIKRLLEDVERTVR

SEQ ID NO: 21211 - protein, 60 aa, Artificial Sequence
  Synthetic
KEAEDILKEVEDIIREAKKLSERTLDENRKVIRKAKEDSRRSLEEVRKIIEDVKEELDRI

SEQ ID NO: 21212 - protein, 58 aa, Artificial Sequence
  Synthetic
ERVLRVIREIEKLLEDVKRVSERSVKEMKKTLDDVRRASKRSEEEIERLLRDVERRVT

SEQ ID NO: 21213 - protein, 60 aa, Artificial Sequence
  Synthetic
RSLEEVLKEVEELIRRAKEESKRTLDDVRKLIEEVKRESERSLRDVREMIERAKDRIRRI

SEQ ID NO: 21214 - protein, 58 aa, Artificial Sequence
  Synthetic
EEVRKVVEDVERLLRDVERMSKEVEKRIRELLDDIRRVSERSRREIERLLEDVERTAR

SEQ ID NO: 21215 - protein, 60 aa, Artificial Sequence
  Synthetic
DELEEILKRIEDRIREIKERSKKTLDDIRKVAERVEERSRESLKEVREVVEEIKDRIRRI

SEQ ID NO: 21216 - protein, 58 aa, Artificial Sequence
  Synthetic
REVLKVIRDIEELLREVAEVSERSRREIEKLLEDVERVSREAIKRIKDLLRDVERTVK

SEQ ID NO: 21217 - protein, 60 aa, Artificial Sequence
  Synthetic
KEIEELLDEIRRLMERSKENVRRSLKKSKDLIEEAKRRLEKSLEDSRELIRRIEDRIRRI

SEQ ID NO: 21218 - protein, 55 aa, Artificial Sequence
  Synthetic
KEVLEEIRRLLEDLRRMNEKSIEDSKRLLEDVARAVKRSIDESRKLLEKIERDVD

SEQ ID NO: 21219 - protein, 60 aa, Artificial Sequence
  Synthetic
KEMEDLLREAEELIRRSVENVKRSLEESEKLIRESKKNVERSLRRSEELAKEIKDEIRRI

SEQ ID NO: 21220 - protein, 55 aa, Artificial Sequence
  Synthetic
ERVLREIRRLLRELEEINEKSIRDSKRLLEEIERVNRDSIRRSKELLEDVERTVR

SEQ ID NO: 21221 - protein, 60 aa, Artificial Sequence
  Synthetic
SEVEDLLRRAEELIRRAKERLERSLRRVEKLIDDVRRKLERNNETVKRLVEEIKEKIKRI

SEQ ID NO: 21222 - protein, 55 aa, Artificial Sequence
  Synthetic
EEMLKEIERLLEDIERVVRETIDTTRRLLEKIEREVREVIKSNRELVADLERTVT

SEQ ID NO: 21223 - protein, 60 aa, Artificial Sequence
  Synthetic
DEVERLLEEVKRLIDRAREELKKSLDRVRRLVRENEEAVRKNNEDVADLIRKIKEKIEKI

SEQ ID NO: 21224 - protein, 55 aa, Artificial Sequence
  Synthetic
KKVLDDIRRLLKDIKDIVDKTIRDTKELLRDIEEKNRRATKSNKDLLEEIRETVR

SEQ ID NO: 21225 - protein, 59 aa, Artificial Sequence
  Synthetic
DEVEKLLRRVEKEVDRIKRELEDNLRRVEKLVKEIHEENEKLMRKARKLVEDIKRIIDR

SEQ ID NO: 21226 - protein, 59 aa, Artificial Sequence
  Synthetic
SEEVKKAEKEIRRLLDELRRVVEEVTKKTKELLRRLKKSSDELRKTIKELLRELEEKVR

SEQ ID NO: 21227 - protein, 59 aa, Artificial Sequence
  Synthetic
KEVDEILRELEELVKEIKKRLEELTREVKRLVDKIHKDNEDNLRDMARLVEEIKEIIRR

SEQ ID NO: 21228 - protein, 59 aa, Artificial Sequence
  Synthetic
SKEVERVERDVERLLDELRRVVKEVLDRIRRLLEELERSSKRVKEETERLVKEVREAAK

SEQ ID NO: 21229 - protein, 59 aa, Artificial Sequence
  Synthetic
SEVDKILEDLRELVERIHKKNKRIVEEDRELVKEIHRKNEENLKTMERLVEEIEKIIRR

SEQ ID NO: 21230 - protein, 59 aa, Artificial Sequence
  Synthetic
SEEVKRVRKDVDRLLKELEDSSREVKERSRRTLEELERSSREVKERTERLLRKLEKAVE

SEQ ID NO: 21231 - protein, 59 aa, Artificial Sequence
  Synthetic
DRLEEILKELRELVETIHRRNEEIVRKVAELVKRIHDHNEENTRRVEELVRRIKDIIRR

SEQ ID NO: 21232 - protein, 59 aa, Artificial Sequence
  Synthetic
SEDVERAKRDVDRLLKELEESSERVLRTIEKLLKELRESSKRVRDETKRLLDELREAVR

SEQ ID NO: 21233 - protein, 59 aa, Artificial Sequence
  Synthetic
SELDEILKRLEKLVEDIKRKLEKLVRDLERLVKRIHDHNEENLKTVKKLVDEIKDIIRR

SEQ ID NO: 21234 - protein, 59 aa, Artificial Sequence
  Synthetic
SREVDRVREDVRRLLEDLKRVAERVKRDIERLLKELKESSDEVKKRTEELLEELERAVR

SEQ ID NO: 21235 - protein, 59 aa, Artificial Sequence
  Synthetic
DEVDDILRRLRELVERIKKHLEDNLRELEELVKRIHDHNKRNVEEVKKLVEEIKKIIAD

SEQ ID NO: 21236 - protein, 59 aa, Artificial Sequence
  Synthetic
SEEVRRVKEEVERLLEEVRRVVRKVKEESKRLLEELRRSSDRVKKETERLLEELERAVK

SEQ ID NO: 21237 - protein, 59 aa, Artificial Sequence
  Synthetic
SEAEALVEEVKRIVEESKRRLEKVVEESRKLVEEVKKRLRDMLKTIEDLVKEVKELLDN

SEQ ID NO: 21238 - protein, 55 aa, Artificial Sequence
  Synthetic
EEVKRKVERLLEEDRRVLEEVKESAKRTSKEVRDELREVSKRVEKLLKDVRDAAR

SEQ ID NO: 21239 - protein, 59 aa, Artificial Sequence
  Synthetic
DEAEDLVRRVRDIVRKSREELKRVVEESDRLVEEVKRRLKKVVEDSKRLVDEVRKLREG

SEQ ID NO: 21240 - protein, 55 aa, Artificial Sequence
  Synthetic
EEVKREVERLLEDDERVLREVAKRSRETLETVRKVLEEVERRSRKTLEEVEKTAR

SEQ ID NO: 21241 - protein, 59 aa, Artificial Sequence
  Synthetic
SEMDELVDRARRIVEESRRLLEEVVKRSKDLVKDVKKKLEDALRRVEEIVRRLDEELKG

SEQ ID NO: 21242 - protein, 55 aa, Artificial Sequence
  Synthetic
EEVKDEVRKLIEEDKKVLDDVRRKSERTLREVEDVLRRVEEEVEKLLRKVEESAK

SEQ ID NO: 21243 - protein, 59 aa, Artificial Sequence
  Synthetic
DEAEKLVEDVRRIVEKIRKELEDVVEESRELVERIRRELERVVEESERLVEELRKELEK

SEQ ID NO: 21244 - protein, 55 aa, Artificial Sequence
  Synthetic
EEVKEEVKKLLEEVRDVLRKVKKASEETLRDVRRVLEEVKRRSEETLKRVREEAT

SEQ ID NO: 21245 - protein, 60 aa, Artificial Sequence
  Synthetic
SEVEDIVRDVKRLVEENHRRNEEIVRRDEDLVRRNNELNKRILEEVEELVRRLEDVARKI

SEQ ID NO: 21246 - protein, 55 aa, Artificial Sequence
  Synthetic
EEALRTAEELIKRLEDSLREVKDRSKRSLDEMKKSADDVRREIERLIKRVRDTTK

SEQ ID NO: 21247 - protein, 60 aa, Artificial Sequence
  Synthetic
SEVEKIVREVEEVVERIRKKSEDSLREVRRLVEEIKRRSEKTVEDDEKLVKDAKDELRRI

SEQ ID NO: 21248 - protein, 55 aa, Artificial Sequence
  Synthetic
EDAKRRIEELMKEVRDVSRRALKEIKDLLREVEEVSKKALKRSKDTVDEVREEVR

SEQ ID NO: 21249 - protein, 60 aa, Artificial Sequence
  Synthetic
DEVEEIVKEVARVVDEIRRLSKESLDRVRKLVEDIERELRKIVKTDRDLVEEAKRVLKDI

SEQ ID NO: 21250 - protein, 55 aa, Artificial Sequence
  Synthetic
REVEKEIRRLVEEVKEVSRKVRKEIEELMRRVEEVVKTVKEESKKTVREVEETAR

SEQ ID NO: 21251 - protein, 60 aa, Artificial Sequence
  Synthetic
DEADEIVKRVEEVVRRAKETLERILKRVEEMLDRIRKESEKTVREDEKLVEEVKDRLRKI

SEQ ID NO: 21252 - protein, 55 aa, Artificial Sequence
  Synthetic
ERLLREIKRLLKEVEDEVRRVEKAIKELVDRVKEVSDRALERSKRTVREVEERVR

SEQ ID NO: 21253 - protein, 56 aa, Artificial Sequence
  Synthetic
SEVEEVKEDSKRTLKELKDVAKKVDDDSKRLLEELERVARKSIEDSKRLLDELRER

SEQ ID NO: 21254 - protein, 59 aa, Artificial Sequence
  Synthetic
EKELRRLVEDDRRLVEEVKRDSERLLDEIRKLVEEIKERLRRSVEELRRRVEEIKKTTT

SEQ ID NO: 21255 - protein, 56 aa, Artificial Sequence
  Synthetic
SSVEKVKRDSERTLREVEKVIEKVDRDSERLLRDVERVITEADERSKDLLRRLEES

SEQ ID NO: 21256 - protein, 59 aa, Artificial Sequence
  Synthetic
DTDLRRLVEEDRKLVTRVKEESKRLLEELRRLVETVRKRSEDLLREIKKRVDEILRRTK

SEQ ID NO: 21257 - protein, 60 aa, Artificial Sequence
  Synthetic
DEIKEVIDRITKVLEDNERVVRKLSEENKKVLDDIRRRAEEIIRRNEEVLRRIKELAKRN

SEQ ID NO: 21258 - protein, 55 aa, Artificial Sequence
  Synthetic
EELKKALDDILRRLEESNRKNIEDSRRILEDVERIVRRVVEVSKDIVRKAEEDVR

SEQ ID NO: 21259 - protein, 59 aa, Artificial Sequence
  Synthetic
SEVEEVIDELRKVLEENKRRVEELSRENDDVLRRIEERLKKIEDELEKILKDVRDLKDN

SEQ ID NO: 21260 - protein, 55 aa, Artificial Sequence
  Synthetic
ERLKEEITRILEELTRINEENKRRSEEILDRVRKDVERVLKRVEDILKEIEDELR

SEQ ID NO: 21261 - protein, 60 aa, Artificial Sequence
  Synthetic
SSVEELEERLRRVLERSERHLRKLEKKVEEVLDESRKNLTRLLRDVERVLRDVEETVRRE

SEQ ID NO: 21262 - protein, 59 aa, Artificial Sequence
  Synthetic
ERKARELKRTVKRLAEESRKILREVEEKVRKVAEDSERILEEVERTVKRVVEEIDRTVR

SEQ ID NO: 21263 - protein, 60 aa, Artificial Sequence
  Synthetic
SKVEKLLRELEEVLKDSERHVREDSDRLRRVLEDSERHVRKVLRDVEKVLREVEDMVRKR

SEQ ID NO: 21264 - protein, 59 aa, Artificial Sequence
  Synthetic
EEKARRLEERVEEIVRESERTSRENNKKSRDIIKTSEDILREAADRVREVVERIRRTLT

SEQ ID NO: 21265 - protein, 60 aa, Artificial Sequence
  Synthetic
KEVEEVIERSKKSNEENERRLRKILEEARRINEENEKLLRKILEEAKRVVEEVRRILKDN

SEQ ID NO: 21266 - protein, 59 aa, Artificial Sequence
  Synthetic
KEELDKLREESKKILRHSERLLKEVEEEVKRILEHSEELLRRVEDKVRRLLKEIEDALR

SEQ ID NO: 21267 - protein, 60 aa, Artificial Sequence
  Synthetic
DEVEEVEKKVDKIDKENEDLLRKVIRDAERINEENTRLLEDILRKAKKMVDDVREILKDR

SEQ ID NO: 21268 - protein, 59 aa, Artificial Sequence
  Synthetic
EEEVRRVAERVKEVVKHSRELLKRVEDMVRRIVEHSKRLLDEVRERVKDLLRKIAEARK

SEQ ID NO: 21269 - protein, 59 aa, Artificial Sequence
  Synthetic
DEVREVVRRLEEIVRDVNKKNRESVREAERLVDRLREILEETSRRLKELVDRVKELIKG

SEQ ID NO: 21270 - protein, 59 aa, Artificial Sequence
  Synthetic
EKEARELEDAVRKLIERLKRSAEEVKKRVEELDEEIRRVVEEDRRTIKELKEEIDRADK

SEQ ID NO: 21271 - protein, 59 aa, Artificial Sequence
  Synthetic
DEVEEAVKRIEDLVERLRELLEKTSREIEKILKESEDKLRESSDRIRRLLDELKKLIEN

SEQ ID NO: 21272 - protein, 59 aa, Artificial Sequence
  Synthetic
EEKLRKAEDTVRRVIKDVRKMLEDDRRTVEEVIRRDREALEKDRKTVDDVIEDVKRVAK

SEQ ID NO: 21273 - protein, 59 aa, Artificial Sequence
  Synthetic
SEVDEAVEEIKRILEESKKRLDETSEEIKRILEDSERRLRESSKRIRELVKELKKRIDG

SEQ ID NO: 21274 - protein, 59 aa, Artificial Sequence
  Synthetic
KDKLTRIREVVDKVVKEDEDALREDERTVREVIKRDRDLLEEDRRTVEDVIRKVRETAR

SEQ ID NO: 21275 - protein, 59 aa, Artificial Sequence
  Synthetic
SDAEKVVKRIKEIVEDSTRKVRDTSRDIRRILDESRKMLEDVVREIKDLVRRLEELIRG

SEQ ID NO: 21276 - protein, 59 aa, Artificial Sequence
  Synthetic
KDTLDKVREDAERVLEEDKKVADDDRKTVEDVIREDKRLLKRVEEEVKRVIKEVDDAAK

SEQ ID NO: 21277 - protein, 59 aa, Artificial Sequence
  Synthetic
SEVDRAVETIRRILEESEKIIRKVVREIEEILDRSRRLLEKSSEEIEDLVRRLKELIEG

SEQ ID NO: 21278 - protein, 59 aa, Artificial Sequence
  Synthetic
ERLLREAEKDVRRVVEEDEKVLRDVARRVEEVIKADKKLLREDEKTVREVIERVKETAR

SEQ ID NO: 21279 - protein, 59 aa, Artificial Sequence
  Synthetic
DEFREAVRRIKEIIDDSRRKLEKNVKENEELLKRSDDELRKSSEDIKKLLEELRRLIEG

SEQ ID NO: 21280 - protein, 59 aa, Artificial Sequence
  Synthetic
EKSLREVEERVERLLEDDRRLLEENARRVEDLIRKDKEALDRDRKTVEDVKREVEKDAR

SEQ ID NO: 21281 - protein, 59 aa, Artificial Sequence
  Synthetic
SEVDEVVKRIAEIVKTSKDELREAVKRIEDIVRRSEKMVRDNLRENERLVRELDKLAKG

SEQ ID NO: 21282 - protein, 59 aa, Artificial Sequence
  Synthetic
KEKLDRVTETVRRLIEEDKRALEDVERKVEDVIRRDREVLERNRREVERLIKEIEDKRR

SEQ ID NO: 21283 - protein, 59 aa, Artificial Sequence
  Synthetic
KDAERAVEEIRKILEDSKEKMERNVRENEKLVRDSRRKLEENVERNEKLVRDLKRLKEG

SEQ ID NO: 21284 - protein, 59 aa, Artificial Sequence
  Synthetic
KDTLKRVTDEVRRVVEEDKRVLEENRRRVEKLIEEDKRALDENRERVRKLIEDIDKDAT

SEQ ID NO: 21285 - protein, 59 aa, Artificial Sequence
  Synthetic
DEVEDAVEKLKRLVDELERLLREAVRRIEKILEDSTRKVRKNLEENKELVKRLRELIKN

SEQ ID NO: 21286 - protein, 59 aa, Artificial Sequence
  Synthetic
KDLLRKVAEVVRRLEEEIRRLLEEAKRVVDEVIKKDRTVMERNREEVERLIREIEETAR

SEQ ID NO: 21287 - protein, 59 aa, Artificial Sequence
  Synthetic
SEVDEVVERIRRIIKKSKEELDKAVRDIEEILRRLEKELRDNVRENEKLVEDVRRAIEG

SEQ ID NO: 21288 - protein, 59 aa, Artificial Sequence
  Synthetic
KDKLERVSREAKRVLKEDEEALRDVEKKVTDVIEAVKKMLEDNRDRVRRLIEEIKRRAT

SEQ ID NO: 21289 - protein, 59 aa, Artificial Sequence
  Synthetic
DEIREAVKRIRRLLEESHRENKEIVDRLRKLVEESHRKNEKLKRELEELVKKLKEIIDK

SEQ ID NO: 21290 - protein, 59 aa, Artificial Sequence
  Synthetic
SEDLKRAEEEIRKVSEDNKRSVDRVREVVKRLSDENRRSLEEVREVVKRLIREVEEARR

SEQ ID NO: 21291 - protein, 59 aa, Artificial Sequence
  Synthetic
DEIRKVVKEITDLLKKSNDKNRKVVEEIRDLLRKSKKLADELVERLRKLVEDLRRRIDK

SEQ ID NO: 21292 - protein, 59 aa, Artificial Sequence
  Synthetic
SEDLKRVEERAREVSRRNEESMRRVKEDADRVSEKNKEVLDRVREEVKRLIEEVRETLR

SEQ ID NO: 21293 - protein, 59 aa, Artificial Sequence
  Synthetic
DRIRDVAREIRELLKRSNDENRKVVEEVRRLLKESNDTNKRVVDEVRELLERLKEIARR

SEQ ID NO: 21294 - protein, 59 aa, Artificial Sequence
  Synthetic
SEDLKRIRREVEKVSEDNKRSAKEVEDEARKVSEDNERSVRDVKEKADRVIKEVEDEDR

SEQ ID NO: 21295 - protein, 60 aa, Artificial Sequence
  Synthetic
DEERKIKRVLDEVDKHSKRVIAEAKRVVDEVLREVEKVVRRNKEVLDEILREVKRILDEG

SEQ ID NO: 21296 - protein, 55 aa, Artificial Sequence
  Synthetic
EELIKTIRKVNKEIEDRVRDLIKTVRDILRRIEEEVRKSIEDSKRLLRELEARAE

SEQ ID NO: 21297 - protein, 57 aa, Artificial Sequence
  Synthetic
SVVEDLKRTVEEVVKKSEEILKEDRKTVEKVVEEVKKSDKEDRDDVDRVVKEVRKRI

SEQ ID NO: 21298 - protein, 59 aa, Artificial Sequence
  Synthetic
KDLADKVKKDAEEVLKRSKEHVDRSIDRTREILKRLRETNEESIKRTRDILRKIAEEAR

SEQ ID NO: 21299 - protein, 57 aa, Artificial Sequence
  Synthetic
SVSEELKKKVEKVARDVERSLERDATEVTKVVEEVKKSDRKDEETVKRVVKRVDELI

SEQ ID NO: 21300 - protein, 59 aa, Artificial Sequence
  Synthetic
REVAEKVIRDAEKVLDDIRRMNEESIRDTRRVLEENKRKNEESIRKTEEILRRIEEESR

SEQ ID NO: 21301 - protein, 60 aa, Artificial Sequence
  Synthetic
SEVDEVLKELERINRENHREVEELLRRLERILRESKKHIKEVIEDLRRRLKELEDEVRRR

SEQ ID NO: 21302 - protein, 59 aa, Artificial Sequence
  Synthetic
EKKVRELEEEARRVKRSTEEVIKRLRDSVEKLVKDSERVLRELKKEVERVVEEIDKMIK

SEQ ID NO: 21303 - protein, 60 aa, Artificial Sequence
  Synthetic
DEVEKALEESKKSNEENHRKVKKVLESAKDINRRNHDLVRDVIRKLEEILRRIEKVVREG

SEQ ID NO: 21304 - protein, 59 aa, Artificial Sequence
  Synthetic
DKEVTELRESSRRSIESTREAVRTLEEAVREVIKSTDEAVKRLEATVKRIEEEIRKSMK

SEQ ID NO: 21305 - protein, 60 aa, Artificial Sequence
  Synthetic
DDVERVLKKSRDSNRENHEKVKRVIEKSDRSNEDNHRLVEDAIRKAEEILEEVERLVTAG

SEQ ID NO: 21306 - protein, 59 aa, Artificial Sequence
  Synthetic
KEEVDELRKSSEDSIRSTEDVVRKLEETSKRSIRSTEDVARKLEEAVRRIERRIRERTR

SEQ ID NO: 21307 - protein, 59 aa, Artificial Sequence
  Synthetic
SEVEEVLKRSKESVERVDRDVRRVLRELEDLNRKNHKRVEEVIRDAERILREVEDMVRR

SEQ ID NO: 21308 - protein, 59 aa, Artificial Sequence
  Synthetic
DKEVDELRKSSEKSVEDIKRVVDRLRDSARKIIKSTEDVVKELERRVREVIKRIKEEAT

SEQ ID NO: 21309 - protein, 58 aa, Artificial Sequence
  Synthetic
SEIEEIIKRIEKLLRDDEKKIRDSIKRSEDLLREANRENKESIDRVRELLEKVKRLRE

SEQ ID NO: 21310 - protein, 61 aa, Artificial Sequence
  Synthetic
KAEEEVRRLEKRVRDVLRELEKTLKRVTEVHKETTKENEKSARRVKREVEKVIEEVERTRT

SEQ ID NO: 21311 - protein, 58 aa, Artificial Sequence
  Synthetic
SEIEEIIRRIEELEERLKRELDRSIRTSEKLLEDAREINKESIRRVEKLLEEIRRVVD

SEQ ID NO: 21312 - protein, 61 aa, Artificial Sequence
  Synthetic
KAEERVRALEKAVKDVLESLKRLLDEVRKRHKESSEDNERSLKRSKEEAEKVIKAVEDERR

SEQ ID NO: 21313 - protein, 60 aa, Artificial Sequence
  Synthetic
SEIEDIIRRIRKLLEEDKEKIERSIRESRRLLEEAKRINEKSIEDVKRLLREIEDVVDKI

SEQ ID NO: 21314 - protein, 59 aa, Artificial Sequence
  Synthetic
REKVERLREDVDRVRKELEKTLETVTRSHKRSSEENKRSLEESERTARKVIEDIRRRDR

SEQ ID NO: 21315 - protein, 60 aa, Artificial Sequence
  Synthetic
KDIEEVLKRIKDLLEDIRRRLKESEERSRKLLEEAREINERSIERVRRLLEEIRRLKEEI

SEQ ID NO: 21316 - protein, 62 aa, Artificial Sequence
  Synthetic
EEMERKVRELERAVREVIKEVEKLLTDVARKHKKVSRDNKESLRRSEEEARRVIRAVEETDR

SEQ ID NO: 21317 - protein, 57 aa, Artificial Sequence
  Synthetic
STLETVEKKVEEVIRENEKSMRESEEKVDRSTKRIEDVLRRLEETIRKTSDDIAKDV

SEQ ID NO: 21318 - protein, 59 aa, Artificial Sequence
  Synthetic
REDATRVIEEAKRILDEARKLNEETIRRSEELVRRIERVIEEIIKRSEKLLEDVRRESK

SEQ ID NO: 21319 - protein, 57 aa, Artificial Sequence
  Synthetic
SVLDDVRKKVEEVLDRNRELADRSRRTVEEVLRENERVMEESKRTVDEVIKRVAEKL

SEQ ID NO: 21320 - protein, 59 aa, Artificial Sequence
  Synthetic
REDAERMIERLKRILDRVEEENRRAIEELREVLERVRDDNRRTIEELERILKRVEEESR

SEQ ID NO: 21321 - protein, 57 aa, Artificial Sequence
  Synthetic
STVETVREEVERVLKHSDDLIKEVEDVNRRVEEEIKRVIRELEEENERLVREVRKKV

SEQ ID NO: 21322 - protein, 59 aa, Artificial Sequence
  Synthetic
EEEAREIIKRLREVNKRTKEKLDELIKHSEEVLERVKRLIDELRKHSEEVLEDLRRRAK

SEQ ID NO: 21323 - protein, 57 aa, Artificial Sequence
  Synthetic
DEVERVAKEVEDVLREVEKLIRDVRRKVEEVLKHSEEVAKRVRDTNRELVKEVERDI

SEQ ID NO: 21324 - protein, 59 aa, Artificial Sequence
  Synthetic
EKELRDIIRRLKEVLDKLKKDLEDIIRRLEEVNRESERLAREAIRHSEEVLDKLRKDSK

SEQ ID NO: 21325 - protein, 60 aa, Artificial Sequence
  Synthetic
REVEEVKKRIREALEESERVIRENKKKNEELLDRVRKEIERNKKKNEEVLKRAKEVTKAG

SEQ ID NO: 21326 - protein, 55 aa, Artificial Sequence
  Synthetic
EDVKRKIDRMVEESRKLVEDLKRESDRVEEEVRKLVKTIKDEITRSLDEVRKDAE

SEQ ID NO: 21327 - protein, 60 aa, Artificial Sequence
  Synthetic
SEVDEVRKDIERILRKSERDIRRNKEENKRLLDEVRRRIEENRKENEDLLKRIEELRRAG

SEQ ID NO: 21328 - protein, 55 aa, Artificial Sequence
  Synthetic
EEVKKEIDKAVEDSKRLVEDAERVSDEVRERVRRLVERLKEESDRVEREVEKRTT

SEQ ID NO: 21329 - protein, 60 aa, Artificial Sequence
  Synthetic
SEVEEVLRRAEKLSEDNKRENDESLERLRRIVEKVREENEESVKTLEKILKEVEEVVRRN

SEQ ID NO: 21330 - protein, 59 aa, Artificial Sequence
  Synthetic
KEVIKRLEDEVRRLEEDNKRSIKKSEDEIRKLVERLKRSAERSDEVIRKLEKDAEDLIR

SEQ ID NO: 21331 - protein, 59 aa, Artificial Sequence
  Synthetic
DEVERILEDSKRLVDELRERVERVIEESKRLLDDLRRKVEEVVRRLEKIVEDLKRMIEG

SEQ ID NO: 21332 - protein, 59 aa, Artificial Sequence
  Synthetic
EDKVRELKETADRSNEEIKRVLEKIKRMIEDTNRKIKKLLEEIRDVARRVLEEVREVAR

SEQ ID NO: 21333 - protein, 59 aa, Artificial Sequence
  Synthetic
KEVEDVLRESKRLVEDLERRSERSIEESKRLLKELEDLVEEVIRRSEESIDRLRELIKG

SEQ ID NO: 21334 - protein, 59 aa, Artificial Sequence
  Synthetic
EKKVRDAEREARDSNDKIRRSLEKVERVVRETNRRIKELLEKIERVIRDTDRKIAEEAK

SEQ ID NO: 21335 - protein, 59 aa, Artificial Sequence
  Synthetic
SEVEKIVRDSEKLLEDLKRELEKVIKDSDDLVRELKKRVTEVLERLRRIVEELRKLIEG

SEQ ID NO: 21336 - protein, 59 aa, Artificial Sequence
  Synthetic
EEKVRRLEKEARRTNEEIRKLLEKVDEVARRSNERIKAVLEEIKREIEKLKREVEKDAK

SEQ ID NO: 21337 - protein, 59 aa, Artificial Sequence
  Synthetic
SEIEEVLKKSKKLVDDLRKEVEETIRESKKTVDDLDKEIKEVVRRSEESLDRLKKLIDG

SEQ ID NO: 21338 - protein, 59 aa, Artificial Sequence
  Synthetic
ERKVDEIRRAVEETNEEIKRVVDEDNKAVKRSLEEIERVAEEIKRVAEETLKAIEDARR

SEQ ID NO: 21339 - protein, 59 aa, Artificial Sequence
  Synthetic
DEVEELVRRLEELVKRSRDTNRKIIKEIRELSERLKRELEKIARELEKLVEDLKEEVKR

SEQ ID NO: 21340 - protein, 56 aa, Artificial Sequence
  Synthetic
VEKIEDVVRRLLEENERVLRRTEEEARRVLETNRDLLRKIREVVDRLEKEIREAEK

SEQ ID NO: 21341 - protein, 58 aa, Artificial Sequence
  Synthetic
SDADRVAEELKKLVEDSRRENERVIEESKRLVKENEDRNRELIERLKKLVDKLRDILE

SEQ ID NO: 21342 - protein, 56 aa, Artificial Sequence
  Synthetic
VDKVRETVKRLLEENKRVMEKTEEVAKKSSEDIKRVADETRRRAEELLKEVDELRK

SEQ ID NO: 21343 - protein, 59 aa, Artificial Sequence
  Synthetic
SEADEMLRRLKELVDRSRDTNRKILKRSEDLVRDSKKKNDDIIRELRRLLEELRELARR

SEQ ID NO: 21344 - protein, 56 aa, Artificial Sequence
  Synthetic
TDDVRREVERLLRDNKRVLDETRKAAEESTRRNKKVLEESREVVKDVLKKIEDTDR

SEQ ID NO: 21345 - protein, 59 aa, Artificial Sequence
  Synthetic
DEVREVAERLRRLVDESRKRNEEVIKESEALVDRVRKTNEEVMKRLRELIDKLEKDIRR

SEQ ID NO: 21346 - protein, 56 aa, Artificial Sequence
  Synthetic
VETIERVVRELLEENKEVLRKTEEMVKRSTETNKRLLERSKEVADRLRERIKEAAK

SEQ ID NO: 21347 - protein, 59 aa, Artificial Sequence
  Synthetic
DEVDELLKRLRKLVDEVRKENDKMVKESKRLVEDLKRKIDEIIERIERLLEELEKILKD

SEQ ID NO: 21348 - protein, 56 aa, Artificial Sequence
  Synthetic
VEDIEREAERLLRENEELLRRSEEVIRRSTEKIKKVLRDAEERAREILKRVEDAAK

SEQ ID NO: 21349 - protein, 60 aa, Artificial Sequence
  Synthetic
DEVEEVKKKLREIVKRDRDLIERVREELKEILDRNREINRRAIEDLKRILEEVDELVKRG

SEQ ID NO: 21350 - protein, 59 aa, Artificial Sequence
  Synthetic
EELIRDVERVVREVLRRIEKSIRDLDRVIRDVLDKSRELIKRSEDVAKRVVDTLREKAR

SEQ ID NO: 21351 - protein, 61 aa, Artificial Sequence
  Synthetic
DEVETVKKELKELADEVKERNERSIRDSERLLEEVKRRNEKSIRDLERLVEELEDVLRKRG

SEQ ID NO: 21352 - protein, 59 aa, Artificial Sequence
  Synthetic
EKKVKEVTDEVKKVLDEIRELDKRSRDAVRRTNEEIKRLDKESKDVVDRVKKKVEDAVR

SEQ ID NO: 21353 - protein, 61 aa, Artificial Sequence
  Synthetic
REVEEIIERLKKLLKEIAERNTESIKELEELVRRIAEDNKRIIEELRRLLEELADVVRKKG

SEQ ID NO: 21354 - protein, 59 aa, Artificial Sequence
  Synthetic
EKKVREVRKVAEEVLRAIEELDKRSRDAVRRVTKRVKDLDEETKRVVEDVLRRIEELMK

SEQ ID NO: 21355 - protein, 61 aa, Artificial Sequence
  Synthetic
SRVEEIIEDLRRLLEEIRKENEDSIRRSKELLDRVKEINDTIIKELERLLKDIEKEVREKG

SEQ ID NO: 21356 - protein, 59 aa, Artificial Sequence
  Synthetic
EDKVRKVREVAEKVLRDIDKLDRESKEAFRRTNEEIRKLDEDTRRVAERVKKAIEDLAK

SEQ ID NO: 21357 - protein, 61 aa, Artificial Sequence
  Synthetic
SEVEEIIRRLEELVREVAKRNEDIIKRSRDLIRKVKEDNRRSEEELRDLSRRIADIVRKKG

SEQ ID NO: 21358 - protein, 59 aa, Artificial Sequence
  Synthetic
ERKVREVRRVAKKVLEDVKTLDDKTREVARRTNEDIKRLDEKSRKVIEEVRREIEELKR

SEQ ID NO: 21359 - protein, 61 aa, Artificial Sequence
  Synthetic
SEVDEIIKELERLLREIARENERIIRESRKLADEVRKRNEDAIRKLEELVRRLADMVRRKG

SEQ ID NO: 21360 - protein, 59 aa, Artificial Sequence
  Synthetic
KDKVTKVKKVADDVLREIKKLDDETRRVIEDTNKKIKDLDKKTRDVVRKVLEEVKKLEK

SEQ ID NO: 21361 - protein, 61 aa, Artificial Sequence
  Synthetic
SDVEDVIRKLETLVDDLRRKVERIKERSRELIKRIAEENRKVIEELERLLEELADVVRRKG

SEQ ID NO: 21362 - protein, 59 aa, Artificial Sequence
  Synthetic
EKKVRDVRRVAEKVLREVRRLMEEVERVARKTNRDIERLDEETRRVVEKVRKEIEDLRR

SEQ ID NO: 21363 - protein, 57 aa, Artificial Sequence
  Synthetic
SAKDKIAEVAKRVLTENKKLLEESEEVARRTSEESKRLLKESEDVVRRVLDEIRREI

SEQ ID NO: 21364 - protein, 59 aa, Artificial Sequence
  Synthetic
ERLIEEVIRRLEELLKEVKKKNEEVIRRSKELIDRDRDLNRRSIEELERLIREVRKESK

SEQ ID NO: 21365 - protein, 57 aa, Artificial Sequence
  Synthetic
SAKEKIKEVAERVEKRNKELLEESERVIKEVSERSERLLDESRKVVKRSTEEIRDKI

SEQ ID NO: 21366 - protein, 59 aa, Artificial Sequence
  Synthetic
EELIREVIERLKELVDRVEKENRKAIETSRRLLKEDEDLNRESIKRSEELVKDVRRRST

SEQ ID NO: 21367 - protein, 57 aa, Artificial Sequence
  Synthetic
DARKELEEVVRRVEEEIRRLLKDIEDVAREVNRRSEKLLRETEEVIRRSTEEIKRDV

SEQ ID NO: 21368 - protein, 59 aa, Artificial Sequence
  Synthetic
RERVKEIIERLRRLVEELKKLVDEVRKRLEDVVRELKERNKKVIDDSKDLVRRAREESR

SEQ ID NO: 21369 - protein, 59 aa, Artificial Sequence
  Synthetic
DFSERLDEVLRKVRTDIKKLVEKVRRVVEDSRRRVEKLVEDVRRSSEEVLKTVKELLDR

SEQ ID NO: 21370 - protein, 59 aa, Artificial Sequence
  Synthetic
DEVVRRLEKRLRDALKEAEDKVRRDEERNREVLERLEKIVRDLHRENEKAVEDVADRAR

SEQ ID NO: 21371 - protein, 59 aa, Artificial Sequence
  Synthetic
DLSEEVKRVIEEVRKRIEELVDEVRKSTEEVIKRVRRLVEEVERVVEDSRRKVDKLLKE

SEQ ID NO: 21372 - protein, 59 aa, Artificial Sequence
  Synthetic
EEVVRRLKEELEKALRDAERIVKELHEENRKVLEDVKRMVDEDKKKNERVVDEVRRDAK

SEQ ID NO: 21373 - protein, 60 aa, Artificial Sequence
  Synthetic
SLSEEVKKVIREVEEDVKRLVRELRESSERVLKEIKKLVDEVRRVLEESKERVKKLEREG

SEQ ID NO: 21374 - protein, 59 aa, Artificial Sequence
  Synthetic
DEVVRRLKKRLKEALDRLRDIARKLDKENKEALDEARRIVEENKRRNEKVVEDVERRAE

SEQ ID NO: 21375 - protein, 60 aa, Artificial Sequence
  Synthetic
DEVEELKKDLKRVLEEVRKIVEDIHRTNEEVLREVEKIVEDIHRENKEVLEKVEKIMREL

SEQ ID NO: 21376 - protein, 59 aa, Artificial Sequence
  Synthetic
EELVREVKRVVDELEKEVRDLLRRLKESTDKLREDVRRLAERLRDSLREMERDVREKTR

SEQ ID NO: 21377 - protein, 60 aa, Artificial Sequence
  Synthetic
DEVERLKRELETVLRDVERIVEEIHRENKKNLDKVKKIVEEIHKENREVLEKVRKIMEEL

SEQ ID NO: 21378 - protein, 59 aa, Artificial Sequence
  Synthetic
KKLVEEVEEVVKRVEEAVEELARRLEKSTRDVVEESKKLARELEKSLEEVKEEVRKLIT

SEQ ID NO: 21379 - protein, 60 aa, Artificial Sequence
  Synthetic
KELEELIKRLKRVLEENRDIVRKIHEDNERNLDELRKIVERIHKENKRVLEEVKKIFEEL

SEQ ID NO: 21380 - protein, 59 aa, Artificial Sequence
  Synthetic
ERVVREVERVIKKLEDDSRKTVRDLEESTKEVEKRSKELADELEKSIEDLERRVDEDTK

SEQ ID NO: 21381 - protein, 60 aa, Artificial Sequence
  Synthetic
REVEELKKELERVLKKVADLVEENERRNRKNLEDLRRIAEEIHRRNEEVVKRVRDTLERL

SEQ ID NO: 21382 - protein, 59 aa, Artificial Sequence
  Synthetic
EKLVRDVERVVEKVERDVKRLADRVREVLKESSDRSRELVERLRESLRKAREEVRKAIE

SEQ ID NO: 21383 - protein, 59 aa, Artificial Sequence
  Synthetic
KDVDEVLKRLRELIDELRKTNERVKRELKKLVEDLERKNKDVERRLRELIRTLEEIARK

SEQ ID NO: 21384 - protein, 59 aa, Artificial Sequence
  Synthetic
KDMVKKVRDVIEDLKREVERLDRETKEVVERVKRKIEKTNRDSKKVIDDLRREVERLRK

SEQ ID NO: 21385 - protein, 59 aa, Artificial Sequence
  Synthetic
SEAERIVEELRKLIEDLRRKNEEVKERLKRLVREDEKRNEEVLKELEDRADELRKLVEK

SEQ ID NO: 21386 - protein, 59 aa, Artificial Sequence
  Synthetic
KDVVDRLRRVIEDLKRTVEKSNEDSDRVIKEVKKRIDDSLKRVEDVIRRVKETIDRLEK

SEQ ID NO: 21387 - protein, 59 aa, Artificial Sequence
  Synthetic
SDVDRVAKDLEKLIRDLEKINRDVSRENKELIEKDKKINEDVLRELDRLVEELERLVRE

SEQ ID NO: 21388 - protein, 59 aa, Artificial Sequence
  Synthetic
KEMLEKIRKVAERLRREVERSNEESKKSADEAEKTIRKSLKEVEERIREVEKKIRDLKR

SEQ ID NO: 21389 - protein, 59 aa, Artificial Sequence
  Synthetic
SEVDRVLKELDELIRTLEELNKKVSRENRELIKEDKKRNDEVVKRLEDLIRELKERVDK

SEQ ID NO: 21390 - protein, 59 aa, Artificial Sequence
  Synthetic
KDALKKVREVIERLKEEVERLDRETKKSADEAKEAIKRSLEEVEDVVRKIREKIKKAEE

SEQ ID NO: 21391 - protein, 59 aa, Artificial Sequence
  Synthetic
DEVERAKEELEKLVRKDEEDNDRVRKRLEELIRRLKEENDRVLEELRRLSEELDRLAKE

SEQ ID NO: 21392 - protein, 59 aa, Artificial Sequence
  Synthetic
KEALDEVRRVIEEVKREIERSLRESREVIKELKERVKELDERTREVVRKVKEEIDELER

SEQ ID NO: 21393 - protein, 59 aa, Artificial Sequence
  Synthetic
SEVDDVLRRLDKLVKDDKRTNDRIVTRDRETVKRVKEVNREIVERLERLVDRVREIVER

SEQ ID NO: 21394 - protein, 59 aa, Artificial Sequence
  Synthetic
EDALRKVREVIRRVEEDIKRSLRDSERVIEEVVTRNEKVDRETKKVVDEAKREIDERAK

SEQ ID NO: 21395 - protein, 60 aa, Artificial Sequence
  Synthetic
SELEKLIEELERVLKRIEEVSRELDKELETVLDEIRRASKRLNDELRRALEEIARAATEN

SEQ ID NO: 21396 - protein, 58 aa, Artificial Sequence
  Synthetic
KLLERAEDVIRRVREALEELVRTNRESLERVERAARELNRRNEESLERARREVEKLRR

SEQ ID NO: 21397 - protein, 60 aa, Artificial Sequence
  Synthetic
DEVRELIDRLRKALEEITRESRRLDEELRKVLEEVERRVEELSRRNKEMLDRVREKVTRR

SEQ ID NO: 21398 - protein, 59 aa, Artificial Sequence
  Synthetic
SRLLEELKRVIDEVRREVERLNKKNKESLDRARRRVEDLLRRLEESVRRVEEELKKLST

SEQ ID NO: 21399 - protein, 59 aa, Artificial Sequence
  Synthetic
SELERVIRESERTVEESHKHVREVIRKLRDIVRRSHEHVREVIERSKESVERVRDLVRR

SEQ ID NO: 21400 - protein, 59 aa, Artificial Sequence
  Synthetic
EELVRRLKKVLDESEKAVTRNIEEIKKVLEDVVRKAEKNIREIAEVLERSTRAAKKDTD

SEQ ID NO: 21401 - protein, 60 aa, Artificial Sequence
  Synthetic
ELEKRIDEVLKRVEDEIRKSIRENEEVLKDVERAVKELIKENERVLEEVREEVRKIIERV

SEQ ID NO: 21402 - protein, 59 aa, Artificial Sequence
  Synthetic
EDIVREVEKELEDILRDNRRLVRESIESLKDVVRRVAELVERSIRELKKMVDEIRKEAE

SEQ ID NO: 21403 - protein, 60 aa, Artificial Sequence
  Synthetic
KLEERIEKVLEDAERDVRRSEEEIRRVLKEVEDRVRRLLRENEDALRRVEEEVKKIIDRV

SEQ ID NO: 21404 - protein, 59 aa, Artificial Sequence
  Synthetic
EKIVKRVIETLRELLKENRKLVKDVIEDLKRIVKEVEELVRESIERLKDMVRRISEKAK

SEQ ID NO: 21405 - protein, 59 aa, Artificial Sequence
  Synthetic
KEVEEIIETLKRLSEDLERKVREIIERLKRLSERLERENKEVIKELERLIDELRKLVED

SEQ ID NO: 21406 - protein, 59 aa, Artificial Sequence
  Synthetic
SEDLRKLDRVVKESERTIRDLLRKLDEVAKRSDDTIERVNDETAKVIERVKRKIEELEK

SEQ ID NO: 21407 - protein, 59 aa, Artificial Sequence
  Synthetic
REVEEMIKELEELLKDLKEKNERASKRNRELVRRLEEENKRVIEELKKLVKELEDLVRS

SEQ ID NO: 21408 - protein, 59 aa, Artificial Sequence
  Synthetic
SEKLKELRDVIKEVKKRIDELDEYTRESIRRAKKEIERLNRETKKVIEEVVKRIEEERK

SEQ ID NO: 21409 - protein, 56 aa, Artificial Sequence
  Synthetic
SEKEEVRRVIEELRRILKRVLEDLRRVVKENEDRLRELKKENEKSLRELEERARRI

SEQ ID NO: 21410 - protein, 56 aa, Artificial Sequence
  Synthetic
VEDLKREIDRVAKEVEEVLEENRRRNEKSVEELRRDSKRNHERNEEVVKEAEDAAR

SEQ ID NO: 21411 - protein, 56 aa, Artificial Sequence
  Synthetic
SEEERVRKALEELKRELDKVHENNKRSLRENEETLKKLLEDNERSLRELEEEMRRV

SEQ ID NO: 21412 - protein, 56 aa, Artificial Sequence
  Synthetic
VEELIKTLRRVAKEVRERSEENDRRNKKSVDELREDSKRNHDENDKVLKKLEKAAE

SEQ ID NO: 21413 - protein, 56 aa, Artificial Sequence
  Synthetic
DEVEKLEEDSERSLEELRKTVEEVKKRSEDSLRDLERKSRENEKESRRTLRELREK

SEQ ID NO: 21414 - protein, 59 aa, Artificial Sequence
  Synthetic
ERVRKRVKDAAEKSRRVIEDLLREIKRVADDSRREAKRLLDRNKEVLERSKETADREKK

SEQ ID NO: 21415 - protein, 56 aa, Artificial Sequence
  Synthetic
DEVEKLAEDSKRSLEKLRREVEKVKRESRESLKRLKEESEKNVRDLRRLLEELRRR

SEQ ID NO: 21416 - protein, 59 aa, Artificial Sequence
  Synthetic
ERLLKRVKDVMDESRKVIRELLELIKEVIRESKETVKRLLDENKRVADEVRKVVDELRK

SEQ ID NO: 21417 - protein, 60 aa, Artificial Sequence
  Synthetic
SEVEEVEREVKEVIEELDEIVKRVKEENDDSVRKSKRSLDEIEAEVRRVLKELTDRVTKR

SEQ ID NO: 21418 - protein, 59 aa, Artificial Sequence
  Synthetic
EEVLERLTRLIEKLKDVIRRLRERLKKSADDSRDVIRRTLEAIKEIIERLKEVIDRLDK

SEQ ID NO: 21419 - protein, 60 aa, Artificial Sequence
  Synthetic
DEIEKLREDVKKTLEESRKSVEDLERRSEDSIRRSRESVERLKREVKEVIDRLRDARRRG

SEQ ID NO: 21420 - protein, 59 aa, Artificial Sequence
  Synthetic
KRVLDEIKKLADEDNKTVTDSLKRIRDSAKKVDEVVRESLERIRKVAEEITKVVEDVKR

SEQ ID NO: 21421 - protein, 59 aa, Artificial Sequence
  Synthetic
SELETLEKSLRDVLKESRDSVEKLRKEVEDTIKESEDSVTKLLKEIEDVIRRLEDLRRR

SEQ ID NO: 21422 - protein, 59 aa, Artificial Sequence
  Synthetic
EDVLRRIRRAAEEVRKVAKESVDRIRDLAARDNEVVERSLKKIEEVLRRIKKVADDVAR

SEQ ID NO: 21423 - protein, 60 aa, Artificial Sequence
  Synthetic
SEIERLEREVREVIKESEESVRRLKKRVDDTVRENEELVKRLEDRVRRMKERLEDARRRG

SEQ ID NO: 21424 - protein, 59 aa, Artificial Sequence
  Synthetic
DDVKRKIRKVMEEIKKRADDSRRKIEDVARKDNKAVERSLRRIERLLEEITRVVEEIKK

SEQ ID NO: 21425 - protein, 60 aa, Artificial Sequence
  Synthetic
SELEKLDKESRDSIRKSEDSVRRLEEESEESIERSKRLVEELKRLADEVIRRLEDMARRG

SEQ ID NO: 21426 - protein, 59 aa, Artificial Sequence
  Synthetic
EDVLRAIEESMKRARKAVEDSLRRIRESLEKVKEEVRRSNEKIKKIVKEVREVVERIAD

SEQ ID NO: 21427 - protein, 60 aa, Artificial Sequence
  Synthetic
DELEDLEREVREVIEESKRLLEELEKRVKEVIKTSRDSVRRLKERVDRVIKELRDAKRRG

SEQ ID NO: 21428 - protein, 59 aa, Artificial Sequence
  Synthetic
EDVLRKIRELLEEIRRVIEETNRRIKKLLEEIKRVADDSRRRIRKVAREVEEEAKEIEK

SEQ ID NO: 21429 - protein, 60 aa, Artificial Sequence
  Synthetic
SVRERIDELEKKIKRVVEKVLKENKDSLKRVEERVRRLLEENKRSLDEVREAVERVLSEV

SEQ ID NO: 21430 - protein, 56 aa, Artificial Sequence
  Synthetic
VEKLERDVEKVIEDARRTSEEVKRENDKALKDLDRLSEEVEKENRKALEDLKRTSD

SEQ ID NO: 21431 - protein, 60 aa, Artificial Sequence
  Synthetic
SVRETIDKALKKIRDVAEDLKRRNDELLKEIEEVARDSSEKIRRALEEVERRVREVLKRV

SEQ ID NO: 21432 - protein, 56 aa, Artificial Sequence
  Synthetic
VEKLKKDIERIIRELEELSDRLKKIIEEVIKKSEDLVRRLRESLERVLREIDKTTK

SEQ ID NO: 21433 - protein, 60 aa, Artificial Sequence
  Synthetic
SVREEIDRILREIEEVVKTSSERIKRLLEKIEEVVKRLIEENRRVLKRTDEEADRLLKEV

SEQ ID NO: 21434 - protein, 56 aa, Artificial Sequence
  Synthetic
VDTLRKEVKEVIDTSEDLVRRLEEEVRKAAKRLKDLVDDSRRLNTEILRTLRERRR

SEQ ID NO: 21435 - protein, 60 aa, Artificial Sequence
  Synthetic
DDLKRLEEDVRRIIEENDRIVKDIAEKSKKSIEDNRRLLKRLRDESERTIDDIRRLKEEG

SEQ ID NO: 21436 - protein, 55 aa, Artificial Sequence
  Synthetic
EEIRRLLKEITDVVRESNRRIKRINETAHEVVRRSNTETTKVNKKAHDVVEEVKR

SEQ ID NO: 21437 - protein, 60 aa, Artificial Sequence
  Synthetic
SLIEKIREIVKEIIKRSDDSVEEVKRRNEESIRRSEESVKDNRRRIEDIIRKLKRLKEEG

SEQ ID NO: 21438 - protein, 59 aa, Artificial Sequence
  Synthetic
DDMLRKIEALAREVTEVSKRALEEIRKLMEESTEVSKRALERIEASVEEVRRVAEEVKR

SEQ ID NO: 21439 - protein, 59 aa, Artificial Sequence
  Synthetic
SLLEEIEKEVREIIKRSRKSLEEVKRRNDDSIRKSEKLVEDNKREIEEVKERARKLKED

SEQ ID NO: 21440 - protein, 59 aa, Artificial Sequence
  Synthetic
KRVLEEIDRLAKDVKRVSDEVLEEIKRLAKESKEMADRSNEEIKKSVEEVRRVVEEVEK

SEQ ID NO: 21441 - protein, 59 aa, Artificial Sequence
  Synthetic
DEIEELEKLIRKAIKDSRDLVRKLEEENKRSIDTSRELLKELERMLDEVRRRLEDLKRK

SEQ ID NO: 21442 - protein, 59 aa, Artificial Sequence
  Synthetic
EELLREIKKLLDTIRRVIEESSERIKKLAEDSREVVKESSTEIKRLLETITEVVDRVTK

SEQ ID NO: 21443 - protein, 59 aa, Artificial Sequence
  Synthetic
DEVEEAEKLIRKVIKDSEKLLRDLADLNRKSIRRSEKLVEDDRRANEDVIRKLEELRRN

SEQ ID NO: 21444 - protein, 59 aa, Artificial Sequence
  Synthetic
EELLRRIKKLLDEIKKAIEDSSREIKRLLEESERVAKRSSEDIKRTLDDTRRVVEEVRR

SEQ ID NO: 21445 - protein, 60 aa, Artificial Sequence
  Synthetic
DVEETVRKLIEDVKRVMERVRKSNTDLIRRSKEVLKDARRLHEELTKEVKDVLRRLEEEV

SEQ ID NO: 21446 - protein, 59 aa, Artificial Sequence
  Synthetic
REVVKRVEEDVRKKLEESTKDSKRVERESEENLRRAKEKSKRVLKKLKDDLRRLEEESR

SEQ ID NO: 21447 - protein, 60 aa, Artificial Sequence
  Synthetic
SVKETVKDLEREVREVLKKLRDDVRKLIEESDKALKRLKKIHDDLSRDVRRVLEDLRRRV

SEQ ID NO: 21448 - protein, 59 aa, Artificial Sequence
  Synthetic
KKMIDDVVRRVRKKLKEIDEKVKDVERKSRENLKRLKEKSDRVAEDLKKILDELREEVR

SEQ ID NO: 21449 - protein, 60 aa, Artificial Sequence
  Synthetic
SVEETITELIKEVRKVAEEVKKSNKEVIEESEEALKELERTHTELSEEVRKVLRELEEEV

SEQ ID NO: 21450 - protein, 59 aa, Artificial Sequence
  Synthetic
KEVVTEVVKEVKKRLEESKDDSRRVMEESRRNLKKLREESKRVVEELRRELRRLKEEVR

SEQ ID NO: 21451 - protein, 60 aa, Artificial Sequence
  Synthetic
DVEETVRKLIEKVKRVLERLEEEHKRLSDDSRRVVKKLKDDVEDLIRRVEEVLKELERRV

SEQ ID NO: 21452 - protein, 59 aa, Artificial Sequence
  Synthetic
RKAVDEVRKEVDRRLEELKRDSERVVKKSEENLRRLEEEVRKVEEKVRRTLKRLKEEAK

SEQ ID NO: 21453 - protein, 60 aa, Artificial Sequence
  Synthetic
DKLEKVLEEIKRRLEENERLLRKVERDLKRLSKENEDRLRKMLEDLRKLSEDLLRSVEKD

SEQ ID NO: 21454 - protein, 55 aa, Artificial Sequence
  Synthetic
EKVDELLKEVEEIIDRSRKEIDRTRKDNERSVKRSEDAIRKTLDENEKSLREATR

SEQ ID NO: 21455 - protein, 60 aa, Artificial Sequence
  Synthetic
SDVEEMEKRIRDRLRENRRIVEDVAKKLRDLSRRLEEEVKKVAEELRRLSDELRKRVTRR

SEQ ID NO: 21456 - protein, 55 aa, Artificial Sequence
  Synthetic
ERVKDLLREVKRVIDESKKTIRDTLEENEDSIRRLRERIDETLKENEKSIKELKD

SEQ ID NO: 21457 - protein, 60 aa, Artificial Sequence
  Synthetic
SSVEEVKKELDKILEELKEKSERSKEEVERVLKKLREKSDRVEREVRKAEERLRRKVKDI

SEQ ID NO: 21458 - protein, 56 aa, Artificial Sequence
  Synthetic
DETVERLLKKLKDVLEELRRRHEEVSKRLEKVLKELVDRHKKVTEDLKRVLDELRK

SEQ ID NO: 21459 - protein, 60 aa, Artificial Sequence
  Synthetic
SLEETLKKLIEEVEEVLRRSEEIAREAIRRSERVLEELERRHKKVTDEIKEMLRELRERI

SEQ ID NO: 21460 - protein, 59 aa, Artificial Sequence
  Synthetic
EELVERVLDKVRRDLEDSRRHLEEVKRKSEESLKKLKKETKDALDTIREKLKRIADELR

SEQ ID NO: 21461 - protein, 60 aa, Artificial Sequence
  Synthetic
SMEEKVKRIIKKVDDVLKDSERRITELIKKSRDVLRELEKRHEELTKRVKDVLDDLRRKI

SEQ ID NO: 21462 - protein, 59 aa, Artificial Sequence
  Synthetic
DRAVDTVRKEVEKALEENRKTVRDVEEESDRSLRRLREKTDEVRRRVEEILKRLKERVD

SEQ ID NO: 21463 - protein, 60 aa, Artificial Sequence
  Synthetic
ELEERIKELIKKVRDVLRKSKEEVDKVIRKSEEVVRETEKLVEDIIRRVEKVLDEVRKRI

SEQ ID NO: 21464 - protein, 59 aa, Artificial Sequence
  Synthetic
KELVRTLERRVEEVLRRNEELVKRVREESDRSIDRSRRSLERAEEDVDRVLKEVKDRTT

SEQ ID NO: 21465 - protein, 60 aa, Artificial Sequence
  Synthetic
DLEKKVEDVIREVEKVLRELRRRHEELTKRSEDAVKETKDRVKEIEDEVRRVVDKVRKDI

SEQ ID NO: 21466 - protein, 59 aa, Artificial Sequence
  Synthetic
DELVKELKRDVERVLKRLKERSDEVRKESEKSIKKSKDSLEKAEREVREMLRDLDRETK

SEQ ID NO: 21467 - protein, 60 aa, Artificial Sequence
  Synthetic
SMEERVKELIRRVRKVLEDTERRAKEIIEDVERVLEELKKRHEDLTRKVDKVLKELKKEI

SEQ ID NO: 21468 - protein, 59 aa, Artificial Sequence
  Synthetic
EKLVTKVEEDAERALRESEESLRKVEREVKRVLEELKRKTEKVARELDKILKELKDRTR

SEQ ID NO: 21469 - protein, 60 aa, Artificial Sequence
  Synthetic
SLEDELRKLIEDVKRVAKETEDRVREILKRSKDVLDELKKEHDKLTREVERVLDELAKEI

SEQ ID NO: 21470 - protein, 59 aa, Artificial Sequence
  Synthetic
EELVKKVKKEVEDVLRRSKESLKKAEEDSRKSLEELKKKTEDLKREVKEILDRLKERVR

SEQ ID NO: 21471 - protein, 60 aa, Artificial Sequence
  Synthetic
SELEKLKREVDEVLKRNKELVDELRKRVRKALEESRRSVEEVERRVEEVLKRLEDDLRRE

SEQ ID NO: 21472 - protein, 59 aa, Artificial Sequence
  Synthetic
EELKEKVRRILKEVRRVLDESRRDVERVLREVEKVMRESIKKARDAIRKVEEVLRELER

SEQ ID NO: 21473 - protein, 60 aa, Artificial Sequence
  Synthetic
RELDDARRKVEEVLKTNKDLVDKIRKEVEETLERLDRSSRKVREIVRRVLEELTRRATER

SEQ ID NO: 21474 - protein, 59 aa, Artificial Sequence
  Synthetic
EELKRLVEKLIKEVEDVLEESRKAVEDVIREDKRRMEESKREADELIREVKKVLDDLRK

SEQ ID NO: 21475 - protein, 60 aa, Artificial Sequence
  Synthetic
KELEDLEREVREVLKRSDESLKRLEEEVRRVLDENDKEVKRVKEKVKKVLDELREIVTRR

SEQ ID NO: 21476 - protein, 59 aa, Artificial Sequence
  Synthetic
EELKREVERLIREVEEVLKKSEEAVRRLIEEVDRALKRSREEFTKAREEVKKVLEDART

SEQ ID NO: 21477 - protein, 60 aa, Artificial Sequence
  Synthetic
DEIDKARKDIEDMLRRLRDLVRKLEDLNRKVVEELKDLVRKDRKLNEDIVRRLERLVRER

SEQ ID NO: 21478 - protein, 59 aa, Artificial Sequence
  Synthetic
EEVKRRIEELLRRVDKVADEVRREVERTNRESEEVVREVEEDVRRSLEEIDKVIKDVRT

SEQ ID NO: 21479 - protein, 60 aa, Artificial Sequence
  Synthetic
SEIDELRKRVEEVLRRLDELVKRLKEENDRVVKKAEDLIRRLEETNREILKKLRKLVKDD

SEQ ID NO: 21480 - protein, 59 aa, Artificial Sequence
  Synthetic
RDVLEKIKDLLRRVKEVADEVEKKIRELNKKTEDVVRELEERVRKLDEDVKRVIEEVKR

SEQ ID NO: 21481 - protein, 60 aa, Artificial Sequence
  Synthetic
SELDEIRERIERIEKDLERLVEEVKRVNDTIVERIKKLIDEVRKENEKVIKTLRDLVREV

SEQ ID NO: 21482 - protein, 59 aa, Artificial Sequence
  Synthetic
EKVEREIRRLLERVKEVIERVKDRVRRVDKKSRDVVREARRAIEEVDRRVRKVVREAEK

SEQ ID NO: 21483 - protein, 60 aa, Artificial Sequence
  Synthetic
DEIKKLEDEVKKILDDLRELIRKLEETNRDVERRLRELIAELRKRNDEVVKRLRDLVRRS

SEQ ID NO: 21484 - protein, 59 aa, Artificial Sequence
  Synthetic
EDVKRKIEEILRRVEEEIRRLKKEVERLDRESKRVIRELREDVKRTNTDVKRVVDEVRK

SEQ ID NO: 21485 - protein, 60 aa, Artificial Sequence
  Synthetic
SLVERLEERVKRIIDELRRILEENRRRVKKVSDENRDLLRRLEEENKKIIEDLRDLKRKG

SEQ ID NO: 21486 - protein, 59 aa, Artificial Sequence
  Synthetic
EKAKDKLRRLEEEIRKVAKEVEDELRRSTEYVKKSLEDAKRKLEELTKRTEDVAEEVER

SEQ ID NO: 21487 - protein, 60 aa, Artificial Sequence
  Synthetic
DLVERVEEKVEDIKRKLRRILEEVDRRNKEVSKENKELLDRLEEENERIIRELEKAKRDG

SEQ ID NO: 21488 - protein, 59 aa, Artificial Sequence
  Synthetic
DRAREKLKRLVEDIDRVAEEVKRTLEELSRYTDKSLEDAERSLERLTKETDEVLKRVTT

SEQ ID NO: 21489 - protein, 56 aa, Artificial Sequence
  Synthetic
SIVERLKKLAEDVIRRLERLSKELAKRNKEVIERLKELSKRLEDKNRRVIEELRRT

SEQ ID NO: 21490 - protein, 59 aa, Artificial Sequence
  Synthetic
EEVKRAIEELRDRIRKVIEDSERTIRKLNDDTRKVVEDSRRTIEELNRTTDKVIEEVRR

SEQ ID NO: 21491 - protein, 56 aa, Artificial Sequence
  Synthetic
RKVDELRKEVKRVIDELRELSERLRKENERVIKTLEDLVRRLEKLLERVERELERT

SEQ ID NO: 21492 - protein, 59 aa, Artificial Sequence
  Synthetic
EEVKKEIDRLRRELDRVIKESEDTIRRLNDETRKVIEKVRRAIEELLRRIEEVIKKVEK

SEQ ID NO: 21493 - protein, 56 aa, Artificial Sequence
  Synthetic
SIVEELRELVKEAIKRLKKLSDDLRRKNEEVIRTLKELLDRLKRKNEEVIKRLEDT

SEQ ID NO: 21494 - protein, 59 aa, Artificial Sequence
  Synthetic
EEVKREIEKLKRDVERVIEDSRRTIEELNRKTEEVIERVRRTIERLNEETKKVIDRVRT

SEQ ID NO: 21495 - protein, 56 aa, Artificial Sequence
  Synthetic
REVDELRKRVEEVIRELEKLSEDLAERNRRVSERNKELVETLARLNKRVIDELRRT

SEQ ID NO: 21496 - protein, 59 aa, Artificial Sequence
  Synthetic
EEVKKAIDDLRRELEEVIKRSKKTIDDLNRYTKKSIEDVREAIKKLNKETDDVAREVKK

SEQ ID NO: 21497 - protein, 56 aa, Artificial Sequence
  Synthetic
SIVEELKKLVEEAIRKLEKLLEELEEKNRDAIRRLKELSDELRKKNEEVIERLKRT

SEQ ID NO: 21498 - protein, 59 aa, Artificial Sequence
  Synthetic
EEVKRMIEKLRRDVEKVIREVRDEIRRLNDTTRRVIDKSRKTIEELNRTTEEVIERVKR

SEQ ID NO: 21499 - protein, 60 aa, Artificial Sequence
  Synthetic
DEEEVMRELKKEIDEALERSKEINDRLRKEIRDVLEKLERIVREVKERSERVLEDVRRKV

SEQ ID NO: 21500 - protein, 55 aa, Artificial Sequence
  Synthetic
KEAVDEIRRILREALEEDKKSVEDIRRDLDKIEKDVKKVLEDNERLLKRLREEVK

SEQ ID NO: 21501 - protein, 58 aa, Artificial Sequence
  Synthetic
DEEEVMKELEDRIREVDKKIEDRLRELKERSDRVLDRSRRINKKLKDEIEDALRRVRR

SEQ ID NO: 21502 - protein, 55 aa, Artificial Sequence
  Synthetic
KEAVDTIERKLRKLEEDLKKVERDNKKLLDDMERDDRRSLEEIKRILDELLEKVR

SEQ ID NO: 21503 - protein, 58 aa, Artificial Sequence
  Synthetic
REEEVMKELDREIEEVLERSREIVERLRREIEEVLKENKKIVETLKREIKKVLREVRE

SEQ ID NO: 21504 - protein, 55 aa, Artificial Sequence
  Synthetic
EEAVKRIRDILEKDERDVREVVRRIREILKASLEDSERSVEEIRRILDELRKEVE

SEQ ID NO: 21505 - protein, 58 aa, Artificial Sequence
  Synthetic
REEEVMERLRREIEKALRESHEIDDRLRKRIEDVLRDSERKLEELRRRIKKVMDDVRR

SEQ ID NO: 21506 - protein, 55 aa, Artificial Sequence
  Synthetic
EEAVRKIREELERMKEENDRVLKEIDKDLKDDDRKIEEVVERIERILRELRERVR

SEQ ID NO: 21507 - protein, 60 aa, Artificial Sequence
  Synthetic
DEKEVADELERKIDEALKESHEIDKRSDDHDKEVLKKSEKRLRELDEEIKDVLRKLEKKV

SEQ ID NO: 21508 - protein, 55 aa, Artificial Sequence
  Synthetic
REAVETIERILKRMIERNRAVVETNKKLNKEDEDKIREVVKRIREKLRKADEEVR

SEQ ID NO: 21509 - protein, 60 aa, Artificial Sequence
  Synthetic
ETEDKVRELLKRIRDVAEKAREKVEELVRRNEEVLKRARETVERLVRKNEEVLREVAERA

SEQ ID NO: 21510 - protein, 56 aa, Artificial Sequence
  Synthetic
KKELEDTVRKVLEDLERKLERLEEESREVERRVKKVLDELKRKSEESEKRLEEAAR

SEQ ID NO: 21511 - protein, 60 aa, Artificial Sequence
  Synthetic
DAEEVVRKLEEELKRLIDKLRKVMEESLKRVKESMDRSRKRIEELVRRLEKILRDLKRDR

SEQ ID NO: 21512 - protein, 59 aa, Artificial Sequence
  Synthetic
EDVLRKLKETVERVRRKVEEVIKKSRESVKRVEETNTRSLRELEETVREVEKRVREESR

SEQ ID NO: 21513 - protein, 59 aa, Artificial Sequence
  Synthetic
SEVEKLLKDLKELLEEVKRRAEESHRDLRRLLEEVRKRVEDSNRELERELRRAEDLVRR

SEQ ID NO: 21514 - protein, 59 aa, Artificial Sequence
  Synthetic
RKMERVVEEIRREVKKVLEDLRRILKESEDAARKVLRDLERLVKHSKDTAREVLKRLKK

SEQ ID NO: 21515 - protein, 59 aa, Artificial Sequence
  Synthetic
SEIEKLLRDLERLLEEVKRKAEKTNRDLEKLLEEVKRKVEDSHRKLKKVLDEVKDLVRR

SEQ ID NO: 21516 - protein, 59 aa, Artificial Sequence
  Synthetic
ERVKRLVEDVRRRVKEVLDDLRRIIEHSRRRAEKVLRELEKLVRESETKAREVLKDLKK

SEQ ID NO: 21517 - protein, 56 aa, Artificial Sequence
  Synthetic
SEAERLLEDSKRVLDEIREDLKRLLKESEDVMREIEKTLEKLVRDVERVLDEVRKS

SEQ ID NO: 21518 - protein, 56 aa, Artificial Sequence
  Synthetic
ERVLRTIKDLHRRLSEEVKRVLDEAEELHRRLSERVREVLEDIRRLVEELIEEVRK

SEQ ID NO: 21519 - protein, 56 aa, Artificial Sequence
  Synthetic
SEAEDLLRRSKERLDEVRKRLDELRRRSERVVEEIRRLLKELLDDVERVRKEVKEA

SEQ ID NO: 21520 - protein, 56 aa, Artificial Sequence
  Synthetic
DRVLRTIEDTHRRLSEDVKRVLKEAEELHRRVTEEVKDVLRKIRETAERLEEEVKK

SEQ ID NO: 21521 - protein, 56 aa, Artificial Sequence
  Synthetic
KEAEELLDTSRRVSEEVEKRLEKLLRESERVAEEIRKRLEELLRRVEKVLDELRKA

SEQ ID NO: 21522 - protein, 56 aa, Artificial Sequence
  Synthetic
EKVLKTIEDEHRRLSESVERVLRTAKRLHDEVSKEVRDVLEEIRRTVEKIIREVRT

SEQ ID NO: 21523 - protein, 60 aa, Artificial Sequence
  Synthetic
SVEEVLKTLEDLARESSEEVRRVAEEIERSNRRVVKEVEKVLREIEELNRKILEEVERDL

SEQ ID NO: 21524 - protein, 59 aa, Artificial Sequence
  Synthetic
EEVLRELLKEVAKVVEDTRRKLEELLKENEEMDRDLKRKLDELLERNREVLERLKRKVD

SEQ ID NO: 21525 - protein, 60 aa, Artificial Sequence
  Synthetic
SVEEVLKELEKLVRDSSREIKKVLEEIDKSNTDLLREVEDALRRIEERVKEALESVDRTV

SEQ ID NO: 21526 - protein, 59 aa, Artificial Sequence
  Synthetic
REMLERLLDTLRRRLEETRKELERLLTENKKKDDEVKEKLKRAEEELEDVRRRLEEKLR

SEQ ID NO: 21527 - protein, 60 aa, Artificial Sequence
  Synthetic
SAEEVLRRLKEAIKRLIRDSERVLEEIRRTNEELIKRTEEVLRRVREKAERLIDDVRRRL

SEQ ID NO: 21528 - protein, 59 aa, Artificial Sequence
  Synthetic
DEALRRIEKEVRDVEKRSKETLEDSKRDSERVRKKSEDTLREIETRVEDVRRKAEEEVR

SEQ ID NO: 21529 - protein, 59 aa, Artificial Sequence
  Synthetic
SESDRIRAIVKKVVDESKESLKRLKEETERVKRELDRVLKENKDKVRRLKEKAEEMKKL

SEQ ID NO: 21530 - protein, 56 aa, Artificial Sequence
  Synthetic
SDVLREVAERVTRLIRDSERVLEELAREHEKASRKVKKVLDESKKIVDDVIRRVDR

SEQ ID NO: 21531 - protein, 59 aa, Artificial Sequence
  Synthetic
SESEEIERTVEDVKRKSDKSLEESRRNVERLKEESEESLERNKDLVRRVAEKVEEVKRD

SEQ ID NO: 21532 - protein, 56 aa, Artificial Sequence
  Synthetic
SEAADRVREEVTKVIKKSEDVLRDSERLHREVIKTSRDVLDKSRRLVEEIIRRVRR

SEQ ID NO: 21533 - protein, 59 aa, Artificial Sequence
  Synthetic
SDVERVLREVEEIIRKARDRSREWLERVKKIIEKVKEDSKRWLDEVRKLIRDVEDIRRR

SEQ ID NO: 21534 - protein, 58 aa, Artificial Sequence
  Synthetic
ERVREVIDRIRKLLKDIIDEARDVNKKVRDLLKRIVEEVTEVNKRVKELVEEIVRRIK

SEQ ID NO: 21535 - protein, 59 aa, Artificial Sequence
  Synthetic
DELREALKRVADIVRTIEEAVRKSLEDSKRIVDDIRRASKEALEEVEKIVRTLVEIVRN

SEQ ID NO: 21536 - protein, 58 aa, Artificial Sequence
  Synthetic
KEVRDVIREVEKLLREVEKIVRDVNRESERLAKEVRDDATEVNERVKELLKRAEAAVR

SEQ ID NO: 21537 - protein, 59 aa, Artificial Sequence
  Synthetic
SVVEELRRTVKELLDEIKRRDDRLLKEVEEVAREVERKDDELRKKVEEILRRIKELRDR

SEQ ID NO: 21538 - protein, 55 aa, Artificial Sequence
  Synthetic
DRVLKELKELMDEAKKNSERVNKKVEDLLRRLDESSRRVNEEIEKRLTELLKAVE

SEQ ID NO: 21539 - protein, 59 aa, Artificial Sequence
  Synthetic
SVVEELLKRVRERLEDVDRVLRTWLEEVERLAEEVKRLDRELEKDVKRILDTIEELKRQ

SEQ ID NO: 21540 - protein, 55 aa, Artificial Sequence
  Synthetic
DKALEDIKRLLEELRKRVEDVSRRVNKLLRDLEENSKRVNDELRKRVETLVERVR

SEQ ID NO: 21541 - protein, 61 aa, Artificial Sequence
  Synthetic
REIEKVLKELRDIVRELEKLLEDVVRKIRKIVEETRKLLEDVVRESDKIHRDAKELMERAG

SEQ ID NO: 21542 - protein, 56 aa, Artificial Sequence
  Synthetic
EDELRKRIAELAERVKRMVKKLDEHAKRDFRRVEEEVRRLRENVKRVKDEVDEAVR

SEQ ID NO: 21543 - protein, 61 aa, Artificial Sequence
  Synthetic
SEIEKVLEELRRRVEELEERLKTVVDELKKIARRTEEKLDKVREEIERIYREAKDLLRRAG

SEQ ID NO: 21544 - protein, 56 aa, Artificial Sequence
  Synthetic
SDELRKAIAELERRVDKMLKELRDHITRDEDRVRRILEELRRHVERSLKRVREEVN

SEQ ID NO: 21545 - protein, 62 aa, Artificial Sequence
  Synthetic
SELEKVLEDVERRLRELKERNDRVLEEITKIHEDAKRENDEVLKEISRAHKEATEELERKIG

SEQ ID NO: 21546 - protein, 56 aa, Artificial Sequence
  Synthetic
LEELRRKLKELEERSERHLEELRRSAETVLRESREHLRRLEDSLRRVRKKVKEETD

SEQ ID NO: 21547 - protein, 62 aa, Artificial Sequence
  Synthetic
SEIETVLRDVKDKLEKLKRDNDKVLDEITKIHEEAMRRNDKVLEDIRRALEELKKRLEEKIG

SEQ ID NO: 21548 - protein, 56 aa, Artificial Sequence
  Synthetic
LEELKKELKKLEDESRKHLEELRRSLEEVTRRSDKHLKELKDRLEELRRKVEAATD

SEQ ID NO: 21549 - protein, 62 aa, Artificial Sequence
  Synthetic
SELEKVLEEIRRELEKLERANKKVLDDAKRIHDKAKEDLRRVLEEIKRRLEELEKRLEEAIG

SEQ ID NO: 21550 - protein, 56 aa, Artificial Sequence
  Synthetic
VEELRKELEDLRRESEEHLERLRDSARRVLEKVRRILKELRDRLRELAEEVKRATD

SEQ ID NO: 21551 - protein, 62 aa, Artificial Sequence
  Synthetic
DELETVLKRVEDLLRRLAEELRRVLEEARETLERLKAANEKVLEEITRTHEEAKRRLDRDIG

SEQ ID NO: 21552 - protein, 56 aa, Artificial Sequence
  Synthetic
VEELDKEAKDLVKEVDEILKRIREELKKLKEDNDKHLEELKESLKRVKDEVDEARR

SEQ ID NO: 21553 - protein, 62 aa, Artificial Sequence
  Synthetic
SELEDVLRDAERIIREAKEDNERVLRRLKETVEKLIKDNDEVLKKLTESHKKLTKELKDAIG

SEQ ID NO: 21554 - protein, 56 aa, Artificial Sequence
  Synthetic
VEELKEEIKDILRRNREHLEELKRRIDELRKENEKHLRDLEESIKEVEKEVRESRR

SEQ ID NO: 21555 - protein, 61 aa, Artificial Sequence
  Synthetic
SEIETVLEDAERKIRELKKRLEDVLRRLAEIYTRAKELLKRVLDELRKIYEDLKKKLEEKV

SEQ ID NO: 21556 - protein, 56 aa, Artificial Sequence
  Synthetic
VEELKKRLDEVARRVEKVLRENEEEIKESLKEVEKMLRRNRKEIKDSEKEVDDEVK

SEQ ID NO: 21557 - protein, 61 aa, Artificial Sequence
  Synthetic
DELERVLEDAETKIRDLKRKLKEVLDKLRRIYEELEERLKRVLEEIEEIYRRAAEALRRKV

SEQ ID NO: 21558 - protein, 56 aa, Artificial Sequence
  Synthetic
VEELKRELEEVAKRVEEILRRNEEEIKKSEEKIRKVLRDNREKAKRSLDRVREALK

SEQ ID NO: 21559 - protein, 61 aa, Artificial Sequence
  Synthetic
DELKKVLDDARETSDRLKKENETVFRELEEIYRRLEKELRRVLRELEEIYRRAEDKLTKSV

SEQ ID NO: 21560 - protein, 56 aa, Artificial Sequence
  Synthetic
VSELDKRIRELERRNRESVKENRDRLKESADDVKRALDRNREELEESERRVKKAVD

SEQ ID NO: 21561 - protein, 61 aa, Artificial Sequence
  Synthetic
SELEKALRDAEEIIKKAKKLLKEALDEAEKIYREAAKLLDDALREAEKIYREAADALDKKV

SEQ ID NO: 21562 - protein, 56 aa, Artificial Sequence
  Synthetic
AKELRDRAKEAADRAKRAAEENRKKARESLERAKRAAEDNRKKAEESLKRAEETAR

SEQ ID NO: 21563 - protein, 61 aa, Artificial Sequence
  Synthetic
SEIEDVLRRAKEISDRLKRENDRVLDELRRSYEDLERELEEVLRKLEETYRRAKEELRKKV

SEQ ID NO: 21564 - protein, 56 aa, Artificial Sequence
  Synthetic
VSELRERIERLKERNRKSLEKNKRDIARSEEEVRKALERNEDEIRRSEEEVKKALK

SEQ ID NO: 21565 - protein, 61 aa, Artificial Sequence
  Synthetic
RELEKVLEDIREISERLEKRNRDVLKELEDIYREAKKRLDDVLRKLKETYDRAEEELRRKV

SEQ ID NO: 21566 - protein, 56 aa, Artificial Sequence
  Synthetic
VSELRKDLRKLAEDNRRSLEENKKEITESLKEVEKVLERNKDEIRKSKERVDKALE

SEQ ID NO: 21567 - protein, 61 aa, Artificial Sequence
  Synthetic
SELERVLDEMRKIIERLEEELRKVLEDLRRIYEELKRKLDDSLRESERRVRELKEELDRKV

SEQ ID NO: 21568 - protein, 56 aa, Artificial Sequence
  Synthetic
VEELKDTIDKVKKRVEDALEKNRRDIDESRKEVDDELRKDEEKAERLAREVEKAKE

SEQ ID NO: 21569 - protein, 59 aa, Artificial Sequence
  Synthetic
SSDETVKEKVKKVARDVDRHVEKLRKALEEMEREVREHVKRLEDELRRMDEEVKRVREE

SEQ ID NO: 21570 - protein, 55 aa, Artificial Sequence
  Synthetic
EKVLRDAERIVRELERKLDKVDTEIAETVKRLEDTIRDVNRKIKDRVDKLRKELE

SEQ ID NO: 21571 - protein, 59 aa, Artificial Sequence
  Synthetic
DSDEKVKRVLEELRKEVKEHVERLRARAEDMSREVKDHVRKLKEDLERMERDVERVKRK

SEQ ID NO: 21572 - protein, 55 aa, Artificial Sequence
  Synthetic
EEVLERVRTEVERLKRELDKVNEDIRKRVEELKKELDEVDDEIRKEVDRLEEALK

SEQ ID NO: 21573 - protein, 59 aa, Artificial Sequence
  Synthetic
SSDEEVKKKLEEVKEEVKRHVERLKRALEKADRDVKDHVRRLKEVLKRMADEVEKVRRE

SEQ ID NO: 21574 - protein, 55 aa, Artificial Sequence
  Synthetic
EKVLKDVEEKIRRLEKELDEVNEDIERKVRELEKELRAVDEEIKRIVDRLRKELE

SEQ ID NO: 21575 - protein, 59 aa, Artificial Sequence
  Synthetic
SSSERVKTELDRMRKEVKRHVEELEKELKRLTEKVKRHVEESKKNAEEITRKVEDVRRK

SEQ ID NO: 21576 - protein, 55 aa, Artificial Sequence
  Synthetic
EEVLREVTREVTRLREELDEVNKRVEKRLEELERELDRSDEEVTRIVEELVDELR

SEQ ID NO: 21577 - protein, 59 aa, Artificial Sequence
  Synthetic
SSEEDVRRKLEKMRKEVDEHVRKLEEDLKRLAEEVKRHVEDLERVAKEVADRVEEVRRQ

SEQ ID NO: 21578 - protein, 55 aa, Artificial Sequence
  Synthetic
KKVLDTARDILRKLEKKLDDVDEKIERIVEKLKRELDEVNKRATETVERLIRELK

SEQ ID NO: 21579 - protein, 59 aa, Artificial Sequence
  Synthetic
RSDEELEKKLKELKEEVDEHVKRLEETARRLDKEVRRHVEESKRNLEEMDREVKEVRRR

SEQ ID NO: 21580 - protein, 55 aa, Artificial Sequence
  Synthetic
DKLLERAERTVRELERRLDEVNDRIRRIVEELKRKLDRSNEEVTRKVRELSKELE

SEQ ID NO: 21581 - protein, 61 aa, Artificial Sequence
  Synthetic
DELERVVEEVRKRIERLKEELRRVHERSREIVDRLRKELEKSLEEVRRIVEDLKRKLRERG

SEQ ID NO: 21582 - protein, 56 aa, Artificial Sequence
  Synthetic
EEDLERMADKLRKDVERAVRKNETDADKLRREVEEVVRRNKKTAKELEDEVRKELT

SEQ ID NO: 21583 - protein, 61 aa, Artificial Sequence
  Synthetic
SEREKVAKEATDIVEELKKTLKDVHRRSKEIVERLVKKLADVNKDSRDKAEELKKRLDDRG

SEQ ID NO: 21584 - protein, 56 aa, Artificial Sequence
  Synthetic
EEDVKRIAKKLEEDVRRVVRKNEEEIKKLAEEVDRVVEDNKRLVEELKRRVDEALK

SEQ ID NO: 21585 - protein, 59 aa, Artificial Sequence
  Synthetic
DADDELRKIVEEADRRSKESVREIEELLRKLEREVEDIVRRIKKLSDDTRKRIDDLRKE

SEQ ID NO: 21586 - protein, 55 aa, Artificial Sequence
  Synthetic
EEVLKRVEEIIKRLEEENRKVLEELERSVRKLEEDIRKVLEDNDRVVKELARRID

SEQ ID NO: 21587 - protein, 59 aa, Artificial Sequence
  Synthetic
SAVEKLEELVERVARRIDELVKKIKELLDDVERKSEKTVRDLERLSEETKRSIDDLRRE

SEQ ID NO: 21588 - protein, 55 aa, Artificial Sequence
  Synthetic
EEVLKRVRETLERLERKIKKVLDELKKRVEELRKKNEDVVRRNEEVVKKLVEDIR

SEQ ID NO: 21589 - protein, 59 aa, Artificial Sequence
  Synthetic
SVEDVIRDLRRVITESRELSERVLERIEETTRRSKEESKRVADKVKKSSDDLREAVERI

SEQ ID NO: 21590 - protein, 59 aa, Artificial Sequence
  Synthetic
DEKAKELLRRVKEVVDRNKEKLDRDLERNKRRIDENRRKLEEDLRRNRKVVEELRKRLE

SEQ ID NO: 21591 - protein, 59 aa, Artificial Sequence
  Synthetic
SVEDVAREIREVLRRLEESVRKVAEDNRRNNEELRRLVEEVLKRIRDSSDRLRKVVEDI

SEQ ID NO: 21592 - protein, 59 aa, Artificial Sequence
  Synthetic
DEVLERLLRRVREAVKELEDELERSSREDNRRSRELEEELKKDLKRNEDEIRDVERALK

SEQ ID NO: 21593 - protein, 59 aa, Artificial Sequence
  Synthetic
SVEEVLRRAEEILTRSKEESRRVFEEIRETTERSKEVSKDVARRNKEILDDLKRKIEEV

SEQ ID NO: 21594 - protein, 59 aa, Artificial Sequence
  Synthetic
DDVLRRLLEKIEEVVRDNERELKEDLDRNRKVIEENRKKLEDHLRRTEEEVDDIRRKLK

SEQ ID NO: 21595 - protein, 59 aa, Artificial Sequence
  Synthetic
KVEEVSKKLKDVLRELEELVERVLERNRENNERLRDKVRKVLEENKEVLDRLKKEVDDI

SEQ ID NO: 21596 - protein, 59 aa, Artificial Sequence
  Synthetic
EEDLRRLLEKIKREIDRLAKELEDSSRDDNRISRELDEELKRHLEETRRAVREISEKLR

SEQ ID NO: 21597 - protein, 57 aa, Artificial Sequence
  Synthetic
SRAEEVLKKVEEEVKKLEDELRRSSERNNRESRRLEDELKKVLDKNRKLVEDLRRAR

SEQ ID NO: 21598 - protein, 56 aa, Artificial Sequence
  Synthetic
KEVVDELRRVLERLRRVIEDVIRRNKEDTDRLEREIERVRKELKDINKKLEEDVRR

SEQ ID NO: 21599 - protein, 60 aa, Artificial Sequence
  Synthetic
DEAETLLRDVERKVEELKRRSEKLLRDVEELVRRLLRSNEESLKKVKEDLKRLKDLVRRG

SEQ ID NO: 21600 - protein, 56 aa, Artificial Sequence
  Synthetic
DEVLREVDRVIDDVRRALKKVNEEIEEVIRRLKRESERVNKEAEEIIRTLEDALRK

SEQ ID NO: 21601 - protein, 57 aa, Artificial Sequence
  Synthetic
DDLERVLEEIRREIERIRRELEESNEENKDIVRRIEEELKELLKDNKRIVETVTKAN

SEQ ID NO: 21602 - protein, 56 aa, Artificial Sequence
  Synthetic
REVLERLEKELDRLRKDIERVADENRKINDTLRKRIEEVMARLDEINTDLKDRVET

SEQ ID NO: 21603 - protein, 56 aa, Artificial Sequence
  Synthetic
SSDEVLKEIEEIIRRLEEEVRRVNKEVNKSTEDLRREVEEVLRRTNELIEELERRV

SEQ ID NO: 21604 - protein, 59 aa, Artificial Sequence
  Synthetic
EEALRKAIKDVRDIVKKVKDELKEWRDRNKELVDRLSEELKEWLKDVERVLKELTDKDR

SEQ ID NO: 21605 - protein, 56 aa, Artificial Sequence
  Synthetic
SLEEVLERIKRIIDELKREAKRVLDETNTLIREVKKRLEDVNRDVNRLIEELRERV

SEQ ID NO: 21606 - protein, 57 aa, Artificial Sequence
  Synthetic
MVRDLERRIREVVKRLKEDLERWKKEVEDEIKRLEDRLKEWLDRVREMLEKLREEDR

SEQ ID NO: 21607 - protein, 56 aa, Artificial Sequence
  Synthetic
SSEEVLKTIKDIIDELRKEAEEVLRRTNESTKELEERAEEVNKRVNDSTRELAKKV

SEQ ID NO: 21608 - protein, 59 aa, Artificial Sequence
  Synthetic
EEMLDEVKKRAEKVVEDLRRELRKWLEDNKRLVEKLEKELRDWLKENKELVKELEDRDR

SEQ ID NO: 21609 - protein, 56 aa, Artificial Sequence
  Synthetic
SSEEVLDTLRKLIEDLRRRAEEVLERTNRSTDELRKRVEKVLEETNRLIKKVEDDI

SEQ ID NO: 21610 - protein, 59 aa, Artificial Sequence
  Synthetic
EDMLREALERIKEIIDRLERELEEWIKTNEDLVRRLTEDLERWLRTVAEILKRLKDEDD

SEQ ID NO: 21611 - protein, 60 aa, Artificial Sequence
  Synthetic
DELERVEEEIKKLSDDSRRVIEEVRRRLEESNKDLERRLREVEKRLKELTDDIKRTAERN

SEQ ID NO: 21612 - protein, 59 aa, Artificial Sequence
  Synthetic
RELLRKLLDDVRRVVERNKRKLRKDLEDNKREIERVKREADKDLEDHERVIRKLKEDIR

SEQ ID NO: 21613 - protein, 60 aa, Artificial Sequence
  Synthetic
DELERVVEEIRELSRDSERAIEEVRRELKRTNDENRESAKRVAEELKKLTDKIKEEADRN

SEQ ID NO: 21614 - protein, 59 aa, Artificial Sequence
  Synthetic
RELLRELLKEVRRVVEENKRRLEEDLKKNRKKIDDSNKELRKDLEDHRRVIEKLEREIR

SEQ ID NO: 21615 - protein, 58 aa, Artificial Sequence
  Synthetic
DELEKVKEDIKRLLDDVRREVEKVNRDSRRLLEDLRRVVKEVSDRSKELAEDLERKVG

SEQ ID NO: 21616 - protein, 56 aa, Artificial Sequence
  Synthetic
VEDVLREVKRLAEEVKKETKRVLDEIKKLVEDVARELERILEDSERLIREVEKRAT

SEQ ID NO: 21617 - protein, 58 aa, Artificial Sequence
  Synthetic
DEIEDVLRRAKKLLDDLRRVVKKANDDSRRLLKKLKDKVEEVSRRSRRLAEDLERTVG

SEQ ID NO: 21618 - protein, 56 aa, Artificial Sequence
  Synthetic
VEDVLREVRKIIEDVKRASEKILEESRKLIEDVERRLEEILKRSEDLIRTVKERKR

SEQ ID NO: 21619 - protein, 60 aa, Artificial Sequence
  Synthetic
DELERVLEEIKRLLDDVHRESKRVNEESERLVKKLHDDSRRVLTEIKKLLDDVRRVVEEL

SEQ ID NO: 21620 - protein, 58 aa, Artificial Sequence
  Synthetic
EKVEEILRRVRELVKKWKTELERALEENEREVERWKRDLDRILEEVRRVVERVEREIR

SEQ ID NO: 21621 - protein, 59 aa, Artificial Sequence
  Synthetic
DELEKLLEDIRRELKRVREDDKRHNDKVKETLDRVRELIKRLLELIKKVADEIRSLKRR

SEQ ID NO: 21622 - protein, 58 aa, Artificial Sequence
  Synthetic
REVEEVKRRIEEILKEAEETNRRSHEKAKRVLEELKDIVRKVLEELRRLLRELEEEVR

SEQ ID NO: 21623 - protein, 59 aa, Artificial Sequence
  Synthetic
EELERLREEIKKILDEARERDETLLREIRREHEKNKRADEEHNRRVEETLERIERLAER

SEQ ID NO: 21624 - protein, 58 aa, Artificial Sequence
  Synthetic
EEVRAVERELRKILDEIRKTNKEVHDRIRELLERSKRSNDESHKKVEDVLRELKKRVD

SEQ ID NO: 21625 - protein, 59 aa, Artificial Sequence
  Synthetic
SETDEVRKELRKLLEDSRRAVEEVKKKLDDSNKEVRDRVRRIREELKKLEKEVREIKRK

SEQ ID NO: 21626 - protein, 55 aa, Artificial Sequence
  Synthetic
EELLKELEEVLKRLRELHKRTIDEVEKSAREVKDEIRRLEEELDRVLKKLEDALR

SEQ ID NO: 21627 - protein, 59 aa, Artificial Sequence
  Synthetic
SLDEDVERLIKELKDEARKLNEEMKEYVRDSERKVRRLNEEIRRLIEELKRKAEELKRG

SEQ ID NO: 21628 - protein, 55 aa, Artificial Sequence
  Synthetic
DRVKERLERVLDEAEKSNEETLRELDDVSRRIEESNRRTLAELEKVLRDIEKDVT

SEQ ID NO: 21629 - protein, 60 aa, Artificial Sequence
  Synthetic
SELEKLVEDLRRAAKESHERNEKLLDESRKTVEDVKRKLEEILRRSEEVVREIKKKKKDI

SEQ ID NO: 21630 - protein, 55 aa, Artificial Sequence
  Synthetic
EEVRRRVEKLIEENRRSSRRVEEEDKRLLKELKDAIKRVEEEDKKLVEELRRSEK

SEQ ID NO: 21631 - protein, 60 aa, Artificial Sequence
  Synthetic
KEVEDLVKEVKERIEESHKENKRILDKARRVVERVETDLRRILEESKRTVEDIERRKERI

SEQ ID NO: 21632 - protein, 55 aa, Artificial Sequence
  Synthetic
EEMKKAVDELIERNKRSSDRVREEAKKLIDRLEEVIEKVERDDEKLVRDLEEELR

SEQ ID NO: 21633 - protein, 61 aa, Artificial Sequence
  Synthetic
SSLETLEKIARDLLREVKETLDRVREESRRLLEEVRRVAEESRKEVERLLKELEEVIRREV

SEQ ID NO: 21634 - protein, 59 aa, Artificial Sequence
  Synthetic
DELLRELAERVRRVVKKIKDELRDDLRRTREEVERLKERHKELVKRVKEAVDKIREEIR

SEQ ID NO: 21635 - protein, 60 aa, Artificial Sequence
  Synthetic
KEVEEILRDVARLVEDNRRVLERILREVEKLIRDNEERLKEILERSKDLVRRIEELIRRG

SEQ ID NO: 21636 - protein, 55 aa, Artificial Sequence
  Synthetic
EEVRRAIEELLKDVERAYEEVVRRIEKLLDDLRRKYEEVKKENERLNRRVEEAAR

SEQ ID NO: 21637 - protein, 60 aa, Artificial Sequence
  Synthetic
DDVEDILRDVERLVEENRRRLEEIVRESEDKVRKNDETLKKILEDVKREVERVERAIERG

SEQ ID NO: 21638 - protein, 55 aa, Artificial Sequence
  Synthetic
KDVVRAIEELLKDVEEKYRRVSERNKELNKRVEDTYREVMKEIRRLLERVDRRAR

SEQ ID NO: 21639 - protein, 57 aa, Artificial Sequence
  Synthetic
TEVERLVERVKEIVEEHRKKLEELARRSEELVERHEKKLRDLLRESRELVERAKKEN

SEQ ID NO: 21640 - protein, 54 aa, Artificial Sequence
  Synthetic
EIKERLKELLREAEEVSRRVNKRNEDLLRRLEKVSREVNERNEDLLEELDRTVN

SEQ ID NO: 21641 - protein, 56 aa, Artificial Sequence
  Synthetic
DEVERLVEEVEKLVEEWIRDLERILDESRRTVEEWKKELKRLLDRSKRLVEDAKRK

SEQ ID NO: 21642 - protein, 54 aa, Artificial Sequence
  Synthetic
DIERRLERLMEELHRVSKEVLDADRELLKELHDVSREVNKRNEELLDELRKTVT

SEQ ID NO: 21643 - protein, 57 aa, Artificial Sequence
  Synthetic
DEVEETVKRVREEVERWKEELKRIADEVRRLVEKVKDDLRRLLDESRKLVEEVRREN

SEQ ID NO: 21644 - protein, 54 aa, Artificial Sequence
  Synthetic
EIKRRLEELLKELHKVSKDLDKILEELLREVEEVVRRVNETNKKLLKELDETVR

SEQ ID NO: 21645 - protein, 57 aa, Artificial Sequence
  Synthetic
SEVEELVKRAAELADEARKRLERIMEEVKRLVDEWEKELKKLLDESKELVEKVRREN

SEQ ID NO: 21646 - protein, 54 aa, Artificial Sequence
  Synthetic
KVREDLRRLLDTLRKVVEELKRRLRELLKKLHDVSRKVNEENERLLRELEETVR

SEQ ID NO: 21647 - protein, 57 aa, Artificial Sequence
  Synthetic
DEAEKLVDEVRELVRRHKETLKEILERVKELVKRWKDTLDKLLRDSEELVRRVKEEN

SEQ ID NO: 21648 - protein, 54 aa, Artificial Sequence
  Synthetic
RVKEELKRLLKELKEMSKRLTEELRRLLKELHDRSREVNERNKRLLEEVDRTVK

SEQ ID NO: 21649 - protein, 56 aa, Artificial Sequence
  Synthetic
DEIREVEERNRRSNEEMKKAVREVEKDIERVAREIRKRAEEVSKRNEDINREIRKT

SEQ ID NO: 21650 - protein, 59 aa, Artificial Sequence
  Synthetic
DETLRRVIRKSEELLKRLKDRLDEVRKRVEEILKRAEERLREVIKRSEELLEEVKRESD

SEQ ID NO: 21651 - protein, 56 aa, Artificial Sequence
  Synthetic
SLLEEVEKTLRKIVEDSDREIKRVSKKNKETVKRLEELMREVNRRSTEIVKRIRDS

SEQ ID NO: 21652 - protein, 59 aa, Artificial Sequence
  Synthetic
KEMLDRIIEEAKRLHEENKRKLEEVERRSEELLKELKRRLEELIKRNDDLLREVEERKR

SEQ ID NO: 21653 - protein, 60 aa, Artificial Sequence
  Synthetic
DEVEEVIRRAEELVKEVKKRLEELIRESEALLERVKRRLERLIEESRRRLEEVKKKVSSG

SEQ ID NO: 21654 - protein, 54 aa, Artificial Sequence
  Synthetic
EIKKRLRKLLEEIKKVVDDVRETNKRTLERLEELARRVNEENKKILDDLEEAVR

SEQ ID NO: 21655 - protein, 60 aa, Artificial Sequence
  Synthetic
KEVDEVVKRAEDLLREVKKRLDEVIEDSERLLREVRKRLEEIIRESEKLLEDVRKVVERG

SEQ ID NO: 21656 - protein, 54 aa, Artificial Sequence
  Synthetic
EIEKRLEEILREIKKLVEEVNRRNEDILRRLEREVEKVRRVNEKTLERIEETVR

SEQ ID NO: 21657 - protein, 60 aa, Artificial Sequence
  Synthetic
SLVEDIRRDVKRILKEIDKLVKDIEEENRRASRESERLVETIRREVKEVLDRIRKLVRDV

SEQ ID NO: 21658 - protein, 59 aa, Artificial Sequence
  Synthetic
RKLIEEIRRRLKKALEDIRRLIEESRKRVEESLTRSRKLAEDIRRELEDVLRKVDEDAK

SEQ ID NO: 21659 - protein, 56 aa, Artificial Sequence
  Synthetic
SRVKEVADRVRDIVRRIKDEIKEHVDRLRDVIRRIKEKLEEHSRRLREIVERIRAS

SEQ ID NO: 21660 - protein, 59 aa, Artificial Sequence
  Synthetic
EELLKRLEDIIRKLLEDIKRVVKELEEVSRTLLREIEELLEENRKSMEKLLRDIEEEAR

SEQ ID NO: 21661 - protein, 56 aa, Artificial Sequence
  Synthetic
SKVDEVVKRLEDAVREIKKEIDKHSKELADEVEKIKKELKDVSDRNREVVRRIREA

SEQ ID NO: 21662 - protein, 59 aa, Artificial Sequence
  Synthetic
EKKAEELRKRVDDLLEEIRRLLEENKRTVDKLLDEIKRVLEDHRRSVEELLREIDKDAK

SEQ ID NO: 21663 - protein, 56 aa, Artificial Sequence
  Synthetic
SEVDEVLREAKRIVDEVHKDNERATEESRRLVKKVHEENEEMVKDIERIVKEVKDA

SEQ ID NO: 21664 - protein, 55 aa, Artificial Sequence
  Synthetic
KELEREVEKLLKRIEESLRRHRKENKRLLEELDRSLRELAKIVKEVLDEIRERTR

SEQ ID NO: 21665 - protein, 56 aa, Artificial Sequence
  Synthetic
SEIEDAVRRIEKRVEEVHRENKKLTDESRKLVREVDEENKKVSRESKKLVEDARRR

SEQ ID NO: 21666 - protein, 55 aa, Artificial Sequence
  Synthetic
RELSEKVREVLEKIKKSLEDHRKANEDLLREIRDSLKKHRDENRRLLKELEETRK

SEQ ID NO: 21667 - protein, 57 aa, Artificial Sequence
  Synthetic
SDLDRVAKELTEIVERIIRELERLTEKSRDIVRKVHKENEDAVRKIRKIVEEVKRKK

SEQ ID NO: 21668 - protein, 55 aa, Artificial Sequence
  Synthetic
RELEKRVRDLLRRVEEALRRHKEENRKLLEDIKRSLEEVAKEVERVLKEIKDTAR

SEQ ID NO: 21669 - protein, 57 aa, Artificial Sequence
  Synthetic
SEMDDVLKKLAETVKRIIERLKKLTDDSRRLVEEVHRRNDKLSKESREAVRKAEERN

SEQ ID NO: 21670 - protein, 55 aa, Artificial Sequence
  Synthetic
RELSEEVKKLLDEVRKALKRHKDENDKLLKEIEDSLRRHKEENDRLLEKLKESTR

SEQ ID NO: 21671 - protein, 57 aa, Artificial Sequence
  Synthetic
DEAREILKEIRDIADELRKRLERLTERSERIVREVDKENRRVVEEIREIVERVKKAK

SEQ ID NO: 21672 - protein, 55 aa, Artificial Sequence
  Synthetic
RELKKEVERVLEEIRRLLEEHERANRKLLKEIRDSLRELKKRVEEVLREIKEATK

SEQ ID NO: 21673 - protein, 57 aa, Artificial Sequence
  Synthetic
SEAEEMLERIKRRVEEVNKENKKMTDESKKIAEDVDRDNREVLREIKRIVDEVRKRN

SEQ ID NO: 21674 - protein, 55 aa, Artificial Sequence
  Synthetic
KELEKEVERVLKEIKDSLRRHRKENEDILREIKESLDELDKEVKRVLKEIRDTAR

SEQ ID NO: 21675 - protein, 57 aa, Artificial Sequence
  Synthetic
SELEEVAKELRKTLEDSTRENKKHTDDVRRIVDEVDKRNRKAVEDIRKIVDEVRKRK

SEQ ID NO: 21676 - protein, 55 aa, Artificial Sequence
  Synthetic
RELEEIVKRLNERDKEVLEKDAEDVKRVLEEIKESLERVARDVERVLEDIKRATD

SEQ ID NO: 21677 - protein, 61 aa, Artificial Sequence
  Synthetic
SALEDLERKVEELIRRLDELLREHRETLERLIRELDKLLTDHHRRNRELLERIKDVVRKAG

SEQ ID NO: 21678 - protein, 59 aa, Artificial Sequence
  Synthetic
EDKLRKIVEELERLVDEVRRSLEKASKRLKDLVKEVKKRLEDITRESEELVRRVEERTR

SEQ ID NO: 21679 - protein, 61 aa, Artificial Sequence
  Synthetic
SALEELKKEIKRVIEELKRALERHHKENEELRKRIDEVLKEHHDANRRLLEEIKELVRRAG

SEQ ID NO: 21680 - protein, 59 aa, Artificial Sequence
  Synthetic
EEKLKEIVKEIRKKVEELKDDLRRMSEESRRLVEELEERLRRLTERSKRLVEDVRRRVT

SEQ ID NO: 21681 - protein, 56 aa, Artificial Sequence
  Synthetic
SEKEELDRKIEDVRKKVEETSRKLKRVNDESKKEVKRTSDELRKKSKEVNEAVERE

SEQ ID NO: 21682 - protein, 56 aa, Artificial Sequence
  Synthetic
VEEAIRRLKETLDRHREEVEDLIRKSREVLKRHEERVRELIKRHEDTLRELKKRAK

SEQ ID NO: 21683 - protein, 60 aa, Artificial Sequence
  Synthetic
SEVDELMKRLKDEAEDIKEKVERLIREWEEAARKIAERVEKLVRDWERVIETLRDLKKRV

SEQ ID NO: 21684 - protein, 59 aa, Artificial Sequence
  Synthetic
KDLAERLRRVLREVERLVRTVNKKHREVLEEIRKEVERVNDEHRRVLEEIKRRVEKDVK

SEQ ID NO: 21685 - protein, 60 aa, Artificial Sequence
  Synthetic
SAEEKLDTEVRRIAEEVKRIIDELRKVTEEVEKRIREINKTSEDTSREVKKTIREVLKRL

SEQ ID NO: 21686 - protein, 59 aa, Artificial Sequence
  Synthetic
EDTVEEVLERLRRALEKADKLVKDHIKRLKDVLRAIEEDHRRHLERLRRMLEEIKKEVT

SEQ ID NO: 21687 - protein, 60 aa, Artificial Sequence
  Synthetic
SVEEKLTREAERLLKRIEEVIRRLRDANRRSADRIRRIDEKTRREVEKLKKKIRELAKRV

SEQ ID NO: 21688 - protein, 58 aa, Artificial Sequence
  Synthetic
DLVEKVIKTMRKIVEDLERDVRKVIRDDEELVERLRRENEEVIKKLREIVKRLEDETR

SEQ ID NO: 21689 - protein, 60 aa, Artificial Sequence
  Synthetic
SLIERLREVAEDLKRRIRKVLEDLRRANEESAKRIRDIDRRTREANRESNERIKEIAKRV

SEQ ID NO: 21690 - protein, 58 aa, Artificial Sequence
  Synthetic
EKVKKVIDDMERIVREIEEKIKRVIERDKKLVKKLEEDNRRVIKKDKDLVRRLEERTR

SEQ ID NO: 21691 - protein, 57 aa, Artificial Sequence
  Synthetic
SLKERLRDDAKRLLDEDRKVLEDLERRAKEINDRNEEIVKKLRDKVREILERIDREV

SEQ ID NO: 21692 - protein, 59 aa, Artificial Sequence
  Synthetic
EEVIRRILEELRELVERSERTVRDIERELDELIDKSRRDVEEIIKDLERELEELKRKTK

SEQ ID NO: 21693 - protein, 57 aa, Artificial Sequence
  Synthetic
RVREELEKAAEEVRRRDRRVLEELEKEVRRINEDNKRVHETSREVVERILETIDRRV

SEQ ID NO: 21694 - protein, 59 aa, Artificial Sequence
  Synthetic
EDVIRKIVRELEELVRESKETVDDIIRRLEELIRKSREDNRKIVEELKKLLDDLTREEK

SEQ ID NO: 21695 - protein, 57 aa, Artificial Sequence
  Synthetic
SLKETLEEVVKRVLETDKRLLEKNDRTVREVNERNRRVHEESRRAVERILEEIDREV

SEQ ID NO: 21696 - protein, 59 aa, Artificial Sequence
  Synthetic
EDTIRRIAKEADDLLEDSRRKVEDNSRRLKRLLEESKKSNEEIVRRLEDLLRRLKKESE

SEQ ID NO: 21697 - protein, 57 aa, Artificial Sequence
  Synthetic
SLKEELEEDVKRINDRNEEVLKRLREVAKKLLDDDRKLLKELKKVVEDVLRDVDREV

SEQ ID NO: 21698 - protein, 59 aa, Artificial Sequence
  Synthetic
AEVIKKILEELEKLIKDSEDTAREIIKELKELVERSKRKVEEILKELEDLLEELKRRAD

SEQ ID NO: 21699 - protein, 57 aa, Artificial Sequence
  Synthetic
SMEEKAEEVIKEVDEENKRLIEEAEKVIEDVEREDRRLVDELRKVIEKVERTIERDL

SEQ ID NO: 21700 - protein, 59 aa, Artificial Sequence
  Synthetic
KDVIEEIIERLRRHVEDSEEKIRRIIRRLEEVLKRSKEDIERIIEELERLLDEMRERAR

SEQ ID NO: 21701 - protein, 58 aa, Artificial Sequence
  Synthetic
DMDRKLKEEIKRAERRDKELVKDIERVIEEVLRANKELIERIEKVIDDVRREIEKRLK

SEQ ID NO: 21702 - protein, 59 aa, Artificial Sequence
  Synthetic
KDVIEEIIERIKDILRESEREIRRIIKELREHLKKSADRIEKIRRELERLLEKLEDDAR

SEQ ID NO: 21703 - protein, 61 aa, Artificial Sequence
  Synthetic
SEIEKILRELEEHIKDSEREHRELVERLRDHIRRSKEEHRDLIRKLEERIREVERRVRKDG

SEQ ID NO: 21704 - protein, 59 aa, Artificial Sequence
  Synthetic
KELKDRLKRVSEEHKRRIEDLLRRTKRVSERHREEIRKLLETTERAIKKARETIERLRK

SEQ ID NO: 21705 - protein, 61 aa, Artificial Sequence
  Synthetic
SEIDRLLERLEDHIRKSAKRHRDLVEELREHAERLKRDIERLLEELEKTVRDIEKEVRERG

SEQ ID NO: 21706 - protein, 59 aa, Artificial Sequence
  Synthetic
EDMKRKLEKVSEEHERKIKELLDRTKRASEEHDERVKRLLDELRRVLKEAEERLRELKR

SEQ ID NO: 21707 - protein, 61 aa, Artificial Sequence
  Synthetic
ERIDRIIKELEDLVDESRKRNDDLVRELKKHIKESKDEHDRLVEELDRFVEEVRKRVEKDG

SEQ ID NO: 21708 - protein, 59 aa, Artificial Sequence
  Synthetic
EDAIRKLEDVLRKVRETHERLLDKSRDVSRKHREDIKELLKKTKTVIDRVRKRIKELRK

SEQ ID NO: 21709 - protein, 60 aa, Artificial Sequence
  Synthetic
SEVERIEEELRREIEKVDRDNKKIVDEARRSIDELRKDVEDILRDLRRLVDEVEKMARRG

SEQ ID NO: 21710 - protein, 59 aa, Artificial Sequence
  Synthetic
EELLKRVEDVVDEVRKRLERIDEKTRKAVKEVTDRNDELLKRVREVVKEVRARLEEIRR

SEQ ID NO: 21711 - protein, 56 aa, Artificial Sequence
  Synthetic
SEKEKVDKVVKKVAKRIKDLLDEIKRVADESNERLERLLRRLEEASKRSKKKLKDD

SEQ ID NO: 21712 - protein, 56 aa, Artificial Sequence
  Synthetic
VDTLIKELEDRIDEVEKRIRELIERDKRLVEEVERRIAELIRRDERLVEELKKREE

SEQ ID NO: 21713 - protein, 56 aa, Artificial Sequence
  Synthetic
SEKEKLKDVVRDVERLIKELMERLERVHERTNREITRLLEDARRAMERSNKKLTDL

SEQ ID NO: 21714 - protein, 56 aa, Artificial Sequence
  Synthetic
VDDLLRRLKELIERVRKLIEDSIKELRDIVKEVKDRIKTLIERDKELVKRLEDRAR

SEQ ID NO: 21715 - protein, 57 aa, Artificial Sequence
  Synthetic
SEVDKLVRDLERHIEEAKRRVEELLKEIKKLVEDTKREAKKLLDTLRKKVEDVEREN

SEQ ID NO: 21716 - protein, 59 aa, Artificial Sequence
  Synthetic
EEMLRKMREVSERHKKTIDELRKELKKVLDEWRRRSEKIFEELDEVLKRVEERVKEVER

SEQ ID NO: 21717 - protein, 57 aa, Artificial Sequence
  Synthetic
SEVDELVRRLREHIRRAKERVEELIKRIKTLAKETTDRARKLIEDLKRHIDDARRKN

SEQ ID NO: 21718 - protein, 59 aa, Artificial Sequence
  Synthetic
REVLKKIKEVSDEHRKEIERLRKRLEEVLREWEDTSREVLERLKEVSKRHRDEIREVAR

SEQ ID NO: 21719 - protein, 57 aa, Artificial Sequence
  Synthetic
SEMEDLIRRLREHIEDVRRKVEELIRELEDHIRRAEESVKKREDDLRRHIEEVRKRN

SEQ ID NO: 21720 - protein, 59 aa, Artificial Sequence
  Synthetic
KEVLDEARRVSKEHKDTLEKLLRKAEEASERHKREIERLLKELKEVSEEHRRRIDEVRR

SEQ ID NO: 21721 - protein, 55 aa, Artificial Sequence
  Synthetic
SEVEELIEDLKRHLKEVADRVEELERELRKHLEEHHRRVREIIRRLEDLLRKAEE

SEQ ID NO: 21722 - protein, 59 aa, Artificial Sequence
  Synthetic
EDLKRRIEKVSRDHERTVEKLVRDLERVSREHERTVKENKERIKKVLDDARKRVDEVKK

SEQ ID NO: 21723 - protein, 59 aa, Artificial Sequence
  Synthetic
SEVEKLVRELEDVLRKIERKVRELSKDNKRVLDENKKRVEDVSRDNERAMREIEELRRK

SEQ ID NO: 21724 - protein, 55 aa, Artificial Sequence
  Synthetic
EELKKVLEDVKREVEKLLEEIKRSLEEARKTVKESNDEIRESLERLEEKVRRIEK

SEQ ID NO: 21725 - protein, 59 aa, Artificial Sequence
  Synthetic
DEVKDLVKRLEEVIKRIDEVVKEVDRRNREVLERNRELVERSIRELREVLDRIRRRKKD

SEQ ID NO: 21726 - protein, 55 aa, Artificial Sequence
  Synthetic
SELDKVLEDVKRKVEEILRRIKRSLDEVERDVRRSNEENKKVTKEVREAAEEIKR

SEQ ID NO: 21727 - protein, 59 aa, Artificial Sequence
  Synthetic
DEVEELVRRLREVLEEIRELVERVNDRNRRVLEENRELVTRSIEELRRALERIERLSKD

SEQ ID NO: 21728 - protein, 55 aa, Artificial Sequence
  Synthetic
EKLKKVLEEVERRAKKLLRDIEESLRRVAREVERSNEENKKVTKEVADAVREIER

SEQ ID NO: 21729 - protein, 57 aa, Artificial Sequence
  Synthetic
DEEKKARDVLERWRKRSEDLLRKAEDVLREWRERSERSFKRLRDVLEEARKRVEELN

SEQ ID NO: 21730 - protein, 55 aa, Artificial Sequence
  Synthetic
DELVREIEEVVKETEKRVEELIKEIREMVKKNEREVREIERRLEETLEKIDRDRK

SEQ ID NO: 21731 - protein, 57 aa, Artificial Sequence
  Synthetic
SEEEEIEKALRDWREELKRLLETIERLLREWKRRVEELKKRIEEALKELKKILDDKG

SEQ ID NO: 21732 - protein, 56 aa, Artificial Sequence
  Synthetic
VEEVKKKLEKEIKKNRENVDRLRRRLEEEVKRNERSVEEIKRRLDEIARELDERKK

SEQ ID NO: 21733 - protein, 57 aa, Artificial Sequence
  Synthetic
SEDEEIKEALKEWRDEVRRLEEKIRRVLEKWERDVRRLKEEIKKSNEDLRRRLEEKG

SEQ ID NO: 21734 - protein, 56 aa, Artificial Sequence
  Synthetic
VEEVKKRLKRLIEENRKNVKRLEERIREAVKKNEKSVEDSERENRDIARELDEKRK

SEQ ID NO: 21735 - protein, 60 aa, Artificial Sequence
  Synthetic
EEVERLKERLERLSERSKEIAKRVHEENKKLSEESRKLVEDVHRENEEAAKRLEDVARRN

SEQ ID NO: 21736 - protein, 59 aa, Artificial Sequence
  Synthetic
RELLERLRRVLEEHREVNERILEEIKRSLDEHKDTNRKLLEEIEKSLRDLEEIVRRLEK

SEQ ID NO: 21737 - protein, 60 aa, Artificial Sequence
  Synthetic
REIEEIEKEVRDVSKESEDIVRTVHDENRRASERSRELVKRVDEENRKAVEDLERVAREN

SEQ ID NO: 21738 - protein, 59 aa, Artificial Sequence
  Synthetic
DELLRRVRKLLEDHKRVNERLLEEIEKSLKRHREENERLLEEIRKSLEDVERVVEEIKR

SEQ ID NO: 21739 - protein, 60 aa, Artificial Sequence
  Synthetic
SELEELEKRLRKAVRDLEEIVDRVRKDLERASDDSRRIVEEVHRENRKVAKELKEVRDRN

SEQ ID NO: 21740 - protein, 59 aa, Artificial Sequence
  Synthetic
EELLEALERLLRELEKIVRKLLRELEEMLRRHEKTNRELLERIRRSLEELAKIVEDLET

SEQ ID NO: 21741 - protein, 60 aa, Artificial Sequence
  Synthetic
DEIEEIKKELDELSKRSEKIVRDLERELREASKESERLVRKVHDDNRKALEELRDVRRRN

SEQ ID NO: 21742 - protein, 59 aa, Artificial Sequence
  Synthetic
DELLKEVRRALEEHERVNRELLERIRRVLEEHKRVNEELMREIDRSLKELAEIVKRLKD

SEQ ID NO: 21743 - protein, 60 aa, Artificial Sequence
  Synthetic
DELEELRKELKKMVDEIEEIVRRVDKENRDASRESEELVERIVEEVRKAVTELKELKKRN

SEQ ID NO: 21744 - protein, 59 aa, Artificial Sequence
  Synthetic
DELLKEVRKALERLKEEVKRVLEDIRRSLEEHRKVNERALRRIEEVLRDLERIVEEVKT

SEQ ID NO: 21745 - protein, 60 aa, Artificial Sequence
  Synthetic
SEVERLKDELRKASEELKKEVEEIEKRLREMSERSRKLVEELKRTLKEIEKELKDIVRKD

SEQ ID NO: 21746 - protein, 59 aa, Artificial Sequence
  Synthetic
DRLKEEVERVLREHEKSLERLRERLKELLERHHKTNEELLREIKEALERLEKIVKDLTD

SEQ ID NO: 21747 - protein, 60 aa, Artificial Sequence
  Synthetic
DEVEDAERRLREMSERIEDLVRRVEERLRRMSEESKKLVEDVKRENDKSVEELDRIVRRD

SEQ ID NO: 21748 - protein, 59 aa, Artificial Sequence
  Synthetic
DRLKERLEKLLRDHRRSVEEVIKKLDRLLKEHHKVNEKLLRDIDKSAKEVKKVVEDKTR

SEQ ID NO: 21749 - protein, 60 aa, Artificial Sequence
  Synthetic
SEVEEAEKELREMSKTSTRLVEELEERLRRASETLKKLVDDVKRELDKRLEDIDRRVARN

SEQ ID NO: 21750 - protein, 59 aa, Artificial Sequence
  Synthetic
DRLKERVDRLLEEHHKVNKRLLERIEEVLRRHETTLRELIKEIDKLLRDLKKRIDDVKK

SEQ ID NO: 21751 - protein, 60 aa, Artificial Sequence
  Synthetic
DEVREVKKELKKIAEELRKLIEEVREELRKMSKRSEELVRELKKRNEKSVRDLERIVRKD

SEQ ID NO: 21752 - protein, 59 aa, Artificial Sequence
  Synthetic
DKLKEELKEALKDLERELKELIEELKRLLDEHHKRNEDLLREIDKSVRKVEEDVRRLKK

SEQ ID NO: 21753 - protein, 60 aa, Artificial Sequence
  Synthetic
SEVDEVRKELERLVREIKKLVEDSKRNLDRLSKELEERVRDLERDARRLVKELRDLLKEN

SEQ ID NO: 21754 - protein, 59 aa, Artificial Sequence
  Synthetic
KEVRDDVRRLIREVDEELKKAKEDLDRAHEEHEKSTERLRERIKEVVDRVREDIERTKN

SEQ ID NO: 21755 - protein, 56 aa, Artificial Sequence
  Synthetic
DEERRIEKVLKEWEKRTRDLARELERVNREHKKTSEDVLKKLEEINREVRRVVKEE

SEQ ID NO: 21756 - protein, 56 aa, Artificial Sequence
  Synthetic
VEKLRRLIEEVIREDERRVERVKRNNKRLSEETEKLVEDVRRNNERLVKEVRDRSR

SEQ ID NO: 21757 - protein, 56 aa, Artificial Sequence
  Synthetic
SEEEEIKKVLDEWRRRTEELRKDLDRVLEEDRRSVEEVKRRLDKVNEELRRRIDEL

SEQ ID NO: 21758 - protein, 56 aa, Artificial Sequence
  Synthetic
VERAKEEIKKVIKEDEDLVRRVRKYIEENSDELRRLVEEARKNNTRIAKEAEDTSR

SEQ ID NO: 21759 - protein, 56 aa, Artificial Sequence
  Synthetic
SEKEEIDKVLKEWEEMTRRLVEELKKSHDEDRESVKRLLERLRDVNRELKEIIDRA

SEQ ID NO: 21760 - protein, 56 aa, Artificial Sequence
  Synthetic
VEKAKETVRKVIKEDRDLVREFKKYNEENSDRMRKLVKDIKENNRRIVEEARERSR

SEQ ID NO: 21761 - protein, 56 aa, Artificial Sequence
  Synthetic
SKEEKLREALKKVRKDVKDLERHIDRSVKRNKEEVDKAKRELERSLEELRRRLEEL

SEQ ID NO: 21762 - protein, 56 aa, Artificial Sequence
  Synthetic
VEELLERLERTLRRMREKVRKLDKENKDHTEKVKEDVKRVHDENDKVREDVDRKDK

SEQ ID NO: 21763 - protein, 60 aa, Artificial Sequence
  Synthetic
REVEELVKEIERVLEETKKRSEDTKREVEKVLEDTKRLVERLRKTLEELLRELDKRVRSG

SEQ ID NO: 21764 - protein, 59 aa, Artificial Sequence
  Synthetic
EELRRTLEKVLREWRDVNRKVNDTDRKVLEDWERVNRTVNEELKEVLERAKEDIDRVAT

SEQ ID NO: 21765 - protein, 60 aa, Artificial Sequence
  Synthetic
DEVERLVEEIKKRIDETRKLLEELKKRIRKVLEETKDLVRRLLKRLRELLKELEERRRRG

SEQ ID NO: 21766 - protein, 59 aa, Artificial Sequence
  Synthetic
EELRRELKRVLDEWKKANDEVRRAMEEILKEWEEVNRKVNKDLRDVLEEVKERLREVAK

SEQ ID NO: 21767 - protein, 60 aa, Artificial Sequence
  Synthetic
SEVEKLKKRLRDLLEELKRLSRRTKEDVRRVIKETRDRSKKTKEELEKLLREIRELRKRG

SEQ ID NO: 21768 - protein, 59 aa, Artificial Sequence
  Synthetic
EDLRTEIKKILEEVKREIDRVRETDEKVLRDWKKANDEVRETDREVLRKIREDLKEVAR

SEQ ID NO: 21769 - protein, 57 aa, Artificial Sequence
  Synthetic
RERETIEKVLDENRKSLEEVTETVKRVLDRWDETLKRLEEEVRRVNDKTRKVLEDLL

SEQ ID NO: 21770 - protein, 56 aa, Artificial Sequence
  Synthetic
VKELKKRVKELSEKLREVLEELERRVREIVKRNKETVDESRKRNEELIKRAEDAAK

SEQ ID NO: 21771 - protein, 60 aa, Artificial Sequence
  Synthetic
SEIDEVRKRVEKHSRDAKRLVDELREKNDRAIKTLERLLRELEKRNKKVIRDLEDVRTKN

SEQ ID NO: 21772 - protein, 59 aa, Artificial Sequence
  Synthetic
EDMVRELRRVLKENDESVRRLKREIEEVHKETERVVKEVLEEIRRVDEELKDVARKVET

SEQ ID NO: 21773 - protein, 60 aa, Artificial Sequence
  Synthetic
REIEEVIKELKRHSEELEKELDRLRRENKEAIRTSKKLVEDLRRENTRAKEELEDVKREN

SEQ ID NO: 21774 - protein, 59 aa, Artificial Sequence
  Synthetic
ERALERLRRVVRENEESVERVLKKIDDIHEETKRVSDRSEKEIEDVDRDLKRKVEEVEK

SEQ ID NO: 21775 - protein, 63 aa, Artificial Sequence
  Synthetic
REREKIKRILDELRKRVEELNRRNEELLRRLDKVVRDVNRTNKRLLEKLRKVADDVRRKLKDE

SEQ ID NO: 21776 - protein, 56 aa, Artificial Sequence
  Synthetic
VDKVERTVEEIEKELTRLVEESEKEVKRIIEELKELLERSRKSVEDIIREVRKLAE

SEQ ID NO: 21777 - protein, 60 aa, Artificial Sequence
  Synthetic
SEEEKLDRLLEELKKVAEEVNRENEKLLEDLERVVRDLNEKNKAALKKLEDAVRRLKEAI

SEQ ID NO: 21778 - protein, 56 aa, Artificial Sequence
  Synthetic
VDRVEERLREIIKTLRKLLEDSKESVRKIIEELKRLVDRSIEDLERIIKELEDKVR

SEQ ID NO: 21779 - protein, 60 aa, Artificial Sequence
  Synthetic
DRERRIETVLRKLKKVVEEVNRRNEKLLDDLRKVVTRLLEEDRRLLEKLRRAAERLKEEL

SEQ ID NO: 21780 - protein, 56 aa, Artificial Sequence
  Synthetic
VTRVKEKIEKIIEELKKLLKDSKKRVEEIIRELEKLVDDSRREVEEIIKELKDRSR

SEQ ID NO: 21781 - protein, 60 aa, Artificial Sequence
  Synthetic
DMREELERILKTLRDVSRESRRELKRLLDENEKTIREVKKRVDEILEKLRKVIDDVRRQG

SEQ ID NO: 21782 - protein, 59 aa, Artificial Sequence
  Synthetic
KKVVDEVDKEIRELIRKDEEIVKEVAERVKKNSEDLRRLLEKARREIEEIIKELEERRR

SEQ ID NO: 21783 - protein, 60 aa, Artificial Sequence
  Synthetic
DEDEIVRDVIRRLDEVLKKLEKTNTELDEELKRVVEELRKVNRTVDEELKRVLDELAKRI

SEQ ID NO: 21784 - protein, 55 aa, Artificial Sequence
  Synthetic
DKLVKDLKRVLDKLEESSRRMLKKLSDALRELEKSSDKVVKDLRKVLKELREEVK

SEQ ID NO: 21785 - protein, 60 aa, Artificial Sequence
  Synthetic
DEDERVEELLRELEEVLDRLAKLNKKLDERNKEVAEESKRLNETVDRELKEVLKRLEEKL

SEQ ID NO: 21786 - protein, 55 aa, Artificial Sequence
  Synthetic
SELVERIRRELERLKRSSEEVVKKLTEELKKDKKSSEEVVKDLRRALRELERAVD

SEQ ID NO: 21787 - protein, 60 aa, Artificial Sequence
  Synthetic
SELEKVKEDIRRLLKRLKEDIKRIKDEIDRLLEELKRHLKEVEEEVDRILEELKDLKRRG

SEQ ID NO: 21788 - protein, 55 aa, Artificial Sequence
  Synthetic
EKLERVKEDVERVLEEYRKRSEDLARRVEKVLREYKKRSDELEKRVEDVIKEVAD

SEQ ID NO: 21789 - protein, 60 aa, Artificial Sequence
  Synthetic
KELEEVARKIDEELKKLDKNIRDIADEIRRILEELEKDLREIEKRIRDILRRLEDLKRRG

SEQ ID NO: 21790 - protein, 55 aa, Artificial Sequence
  Synthetic
DELKTVEDKVRKALREYEEKTRKVKKDVDEVIKKYKTDSDRVLDEVEKALREVER

SEQ ID NO: 21791 - protein, 59 aa, Artificial Sequence
  Synthetic
RVEEKLKRVSDELKRAVDESNKKIEELLERLKRVHDETNKEITEILRELKEVVDKARED

SEQ ID NO: 21792 - protein, 59 aa, Artificial Sequence
  Synthetic
DELVEDIERKIEELIRRDDDLVRRAEEEVEKSIRELRRLVDEVRKEIKKIVKKIEDDVR

SEQ ID NO: 21793 - protein, 60 aa, Artificial Sequence
  Synthetic
SREDKARELLRELEKVDDDHRRRVRELLERLKKVLEDHRRAVKDIIKRLDDELKRIKEED

SEQ ID NO: 21794 - protein, 55 aa, Artificial Sequence
  Synthetic
EEVAKEVKDIVREVEDHLRRVEEEVRRIIREVEEHIRDLERRVRELLEELKRRSK

SEQ ID NO: 21795 - protein, 60 aa, Artificial Sequence
  Synthetic
SEEEKVRRLKEELRRVIEKHKKDVKEIEDRLREVDDRHRREVKKLIEELKKVLEDAKRRK

SEQ ID NO: 21796 - protein, 55 aa, Artificial Sequence
  Synthetic
EEVAKRVKEIIEKVERHITEVKKRAEELVEEVERHIRELKKRVEDLVEEIERDTK

SEQ ID NO: 21797 - protein, 61 aa, Artificial Sequence
  Synthetic
DEKETAEELLRRIEKVIKRLEDTMRKLNKKLKEAIERHHRTAKKLLDDIERVIREVEKDRG

SEQ ID NO: 21798 - protein, 56 aa, Artificial Sequence
  Synthetic
REELEDDVRRIIEEIDRLLRESEEDHEDLIRRLKRSLEELKRLAEDIIRKLSEDRK

SEQ ID NO: 21799 - protein, 61 aa, Artificial Sequence
  Synthetic
REKEAAKRILDRIEKVIRDHHREAKRLNDELEKVIREHHETVKELLKRIKEVIDKFKKDKG

SEQ ID NO: 21800 - protein, 56 aa, Artificial Sequence
  Synthetic
VEELEETARRIIEKLKKSLEDSKRDHERLKKEIEDSLKRLTELVKKIIEEIERDRK

SEQ ID NO: 21801 - protein, 61 aa, Artificial Sequence
  Synthetic
DEDEEARRLLEEIRKVIEEAEEEAKRLNERLRRVIKEHHRKVKELLDEIERVIEKVLRARG

SEQ ID NO: 21802 - protein, 56 aa, Artificial Sequence
  Synthetic
VDELRERVREIKEKLRKDLKDSEDDHRRMEEEIKKSLERLERLVREIIKDLEEKLR

SEQ ID NO: 21803 - protein, 61 aa, Artificial Sequence
  Synthetic
KDEERAKRLLDEIERVIRRHHKTARDLNRELERVLKEHHDTARKLLEDIKKAIDDLKRTRG

SEQ ID NO: 21804 - protein, 56 aa, Artificial Sequence
  Synthetic
AKELEDKVKEIIDRIEKSLEESDKNHKKLIRELEKSLDDLRREAKEIIDDAREKAK

SEQ ID NO: 21805 - protein, 60 aa, Artificial Sequence
  Synthetic
SAAERAEEVLRKLRESLERHKKVNKDLLEEIERSLREVAKDVDRVLKDIKRVLDELKRRR

SEQ ID NO: 21806 - protein, 55 aa, Artificial Sequence
  Synthetic
DEVEELVRRVHRENEKFSKESEDLVREVHERNKELVKRIRKILEDATRELEKAAK

SEQ ID NO: 21807 - protein, 60 aa, Artificial Sequence
  Synthetic
DMKEEAEEVLKEIEEVLKEHRDINRRLLEEIKKSLEDLSREVERVLDEIRRLLKRAVEER

SEQ ID NO: 21808 - protein, 55 aa, Artificial Sequence
  Synthetic
EEVRKIVEDLKKRLKELSEKSERIVRKVHRDNERVVREIRDIVRRLKKRLEDATR

SEQ ID NO: 21809 - protein, 60 aa, Artificial Sequence
  Synthetic
SAKEKVDEVLRRIKELLDRHKKVNEEILEEIRRSLEEHREVNERLLETIDRLLKELKRSR

SEQ ID NO: 21810 - protein, 55 aa, Artificial Sequence
  Synthetic
EEVEEIMRRAEEELRKLSKESRELVKRLHERNEEMSRRSKKIVDEAKKELEDAER

SEQ ID NO: 21811 - protein, 60 aa, Artificial Sequence
  Synthetic
SAEEELDRLEKELDKLLKEHHEENKRLLEEIDRVLKEHEETLRRLIKELREVLKEVKEKL

SEQ ID NO: 21812 - protein, 56 aa, Artificial Sequence
  Synthetic
VEKLREDVERVKRELEDLTRKSEELVKRLKDTLRRVSEELKRRVDEAKKEAREVER

SEQ ID NO: 21813 - protein, 60 aa, Artificial Sequence
  Synthetic
SAEEELKRLLEENERVTEEHHKRNRDLLRRIDEALRRHEKTLEDLIRELDRVLRELERRL

SEQ ID NO: 21814 - protein, 56 aa, Artificial Sequence
  Synthetic
VDDLRRIIEESRRRHEELTKESEKLVREVEDILRRLSEELAELVKRVKDKLDEDAK

SEQ ID NO: 21815 - protein, 60 aa, Artificial Sequence
  Synthetic
SAEETLKRLAERIRKLLEEHRETVKRVIDRLDKVLRDHHRENKRLLEDIDRVLRRLEESL

SEQ ID NO: 21816 - protein, 56 aa, Artificial Sequence
  Synthetic
VEDLDRRVKEVERRLREMSKTIEKLVKDIERELKEASEESRELVERMKRELTEAEK

SEQ ID NO: 21817 - protein, 60 aa, Artificial Sequence
  Synthetic
REIEEILKEIEKSLRDLEEEVRRILEEIKKSLEDLRESMERIVEEVDRRLRTLKEVFDRG

SEQ ID NO: 21818 - protein, 59 aa, Artificial Sequence
  Synthetic
DRVRRIIEKLEEDLRRVNKKIKETLEEAAKRLEDADREIEKILRDLARKIRKVLEEIKK

SEQ ID NO: 21819 - protein, 60 aa, Artificial Sequence
  Synthetic
SEVEEIERRIEKSLKELRERLEEAEKRHEELLERLEREIDRIEKELRKDLKRLRDMTRRG

SEQ ID NO: 21820 - protein, 59 aa, Artificial Sequence
  Synthetic
ERVKKEIDRLEKRLEEVNEEIKKRLKELAERSRRVLERIKDRIRRAAEELKRVLDEVRT

SEQ ID NO: 21821 - protein, 60 aa, Artificial Sequence
  Synthetic
SEIEEILKRLKELLKELKERNEDILRRVEKSLKDLRKKLEEIVRDLRRLLEELREMVKRG

SEQ ID NO: 21822 - protein, 59 aa, Artificial Sequence
  Synthetic
DRVREIIKTAEKELEKALRTSEDIDRRLEERLEKVNKEIREELRRAEEEIKRVLEEVKR

SEQ ID NO: 21823 - protein, 60 aa, Artificial Sequence
  Synthetic
DELDRIRKEVKRISDKNRRHVERLDEEVRKLLEELRKHLEDLTREVERLLRELKEVKKEG

SEQ ID NO: 21824 - protein, 59 aa, Artificial Sequence
  Synthetic
EEMRTKVEELRKRLEESLEEHKRAADELRKRLKKVLEEHEKRVRELEEELRRVLKEAED

SEQ ID NO: 21825 - protein, 60 aa, Artificial Sequence
  Synthetic
DELEELRKLVEEISRENREHLKKLKKLVEDLSRENEKHLRDVDKRVKELLEDLERLTRRG

SEQ ID NO: 21826 - protein, 59 aa, Artificial Sequence
  Synthetic
EDVERELRRLKKELDKSLKEHRTTLERLEEELRKSNKEHRDRVKELREELEKVLRDAKR

SEQ ID NO: 21827 - protein, 59 aa, Artificial Sequence
  Synthetic
SMLDEARKEVKELKDRVERASEKLEDNARRNVEKLERVSEELEREVKRLLDEIEEVKRR

SEQ ID NO: 21828 - protein, 56 aa, Artificial Sequence
  Synthetic
EETLKELERRIREVLKKHDKTLRDLERRIREVNKRHKDVSDRLAERIKKVIRELER

SEQ ID NO: 21829 - protein, 59 aa, Artificial Sequence
  Synthetic
DKEKELEREVDELLKRLEEHSKRVDKTVEDVHRRNEEALRDMERKVREVVEKLKEVKER

SEQ ID NO: 21830 - protein, 55 aa, Artificial Sequence
  Synthetic
EEVDRLRRELREVLKRNRESVERAEEKLKKSVKELDERVKELEEELDRALDELRK

SEQ ID NO: 21831 - protein, 60 aa, Artificial Sequence
  Synthetic
SEVEKLERDVRELHKDNKRHSDELDREVKKLLEELRRALEELKEKVERLTRRLEEVKRRT

SEQ ID NO: 21832 - protein, 55 aa, Artificial Sequence
  Synthetic
KEVEELKRRIDRSVEENEDSIRRLKEEIKRIVDEVRRVVEKLIKEIKDAVKKLRD

SEQ ID NO: 21833 - protein, 59 aa, Artificial Sequence
  Synthetic
DELEELKRRVEELEERNKDHSRKMRETVERVKERLDRHSKEMEKEVRKVVEDIKDVKRK

SEQ ID NO: 21834 - protein, 55 aa, Artificial Sequence
  Synthetic
REVDELKKEIERADKENKDSIEELERELDRVLKENEKSIRELEKELDDVLDEADK

SEQ ID NO: 21835 - protein, 57 aa, Artificial Sequence
  Synthetic
SEAEKLLEENRRELEKVKRDAERLNDEIRERLKEIEDKLKTLNDEIRKLVKEMEDRN

SEQ ID NO: 21836 - protein, 56 aa, Artificial Sequence
  Synthetic
EEILRTIADDNRRVLEEIKKIIKHSRDELERVKRDIDRIVKHSVKLLEDVLRRLRK

SEQ ID NO: 21837 - protein, 60 aa, Artificial Sequence
  Synthetic
DEEEIVKRIEDDARRIIEEVKEVLRRIRDLNERILREAEEVLKEIREINRKVLEDLRRDG

SEQ ID NO: 21838 - protein, 55 aa, Artificial Sequence
  Synthetic
ERVLKRLRDELDKLREDLERILRRNKKLLDELRELLERSRRENEKLVEELKRKAK

SEQ ID NO: 21839 - protein, 59 aa, Artificial Sequence
  Synthetic
SEAERIEEEVKKLLKDVKKKLEELKESSKRVVEELDKVLKELKESSDRLAKEIKKALDD

SEQ ID NO: 21840 - protein, 56 aa, Artificial Sequence
  Synthetic
KDVLEKLRELVKRLIDDLRRVVEELEETNERLDRKLEDVLKKLRETNEKTLRELRK

SEQ ID NO: 21841 - protein, 59 aa, Artificial Sequence
  Synthetic
SVREDLKRVVEDIRRIVKEVHERNREASKRSEDLVREVHERNERIARELKKIVDDLRRV

SEQ ID NO: 21842 - protein, 56 aa, Artificial Sequence
  Synthetic
RRVLEEVRKEVEKVLREIEKSLRDHERENKRLLEDIERSLRELEKTVEKLKRDIRR

SEQ ID NO: 21843 - protein, 59 aa, Artificial Sequence
  Synthetic
SAREALKEAVKEIERIVREVHDRNRRASERSEKIVRDVHRRNKKLTDESKDLVDKARRI

SEQ ID NO: 21844 - protein, 56 aa, Artificial Sequence
  Synthetic
KRVLEEVAKRVEEVLKRIKDSLEEHRRVNDKLLKDIEKSLRDHERANEKLLEDLRK

SEQ ID NO: 21845 - protein, 57 aa, Artificial Sequence
  Synthetic
DELEELLKRIEDVIRRVEELLDELLERHRKVSKESNERLEELLRRHEKVSEEVKREN

SEQ ID NO: 21846 - protein, 59 aa, Artificial Sequence
  Synthetic
EEVEKRVREVLKEIEDRAREVEKRARDSVRRNREELERLERDVRRSLKKLRDDLERMRR

SEQ ID NO: 21847 - protein, 61 aa, Artificial Sequence
  Synthetic
SKVEKLLEDIKKLVKEVSDKIEELLKRLHEVVREIAKAVRDLIRENKRVVDDIVKKVRERG

SEQ ID NO: 21848 - protein, 59 aa, Artificial Sequence
  Synthetic
KEAEDDARRIIEEIERLLREVKKYIEEHIKRLRTVLKKLAEDSKKHLDELRELLRRLEK

SEQ ID NO: 21849 - protein, 61 aa, Artificial Sequence
  Synthetic
SELETLLTDVERLLDESRRVAERVLKEVKELLDEWEKRHKELADRIRELLRRVEEEMKRAN

SEQ ID NO: 21850 - protein, 60 aa, Artificial Sequence
  Synthetic
DEEVRREATDLRREIKEHTDEVEKKLEELAREIEELLERSERSAEELRKEIEKLLEEIRR

SEQ ID NO: 21851 - protein, 60 aa, Artificial Sequence
  Synthetic
SEIEKLLEDFKKRIEDIKRRLERYLEEVRKRVEKVKRELERALEESKRTVDEVKKEIDRA

SEQ ID NO: 21852 - protein, 55 aa, Artificial Sequence
  Synthetic
DEVRKEIRKLLDDIRRVVEKVKRDNERLNRDLNRRVREVIRESEKLNKRLEEAVR

SEQ ID NO: 21853 - protein, 58 aa, Artificial Sequence
  Synthetic
SESETLEKELKELKEEADKLIEDIRRRLEEVARRVERNVTESERTLEELLRRAREKKK

SEQ ID NO: 21854 - protein, 55 aa, Artificial Sequence
  Synthetic
RRVKEEVKRVLEEIERALRTVLKEVRDLLKRLEELHREVLDKNRRVLKAISDEAK

SEQ ID NO: 21855 - protein, 60 aa, Artificial Sequence
  Synthetic
SEDEKVKKDLDELRDRVRKNIERIRRKLKKLLDEARDNVRRSEETLRRLARRVEKIKKDK

SEQ ID NO: 21856 - protein, 55 aa, Artificial Sequence
  Synthetic
RSVKEELRRVLEDLKRLHEEVSKRVEDALREMKELHDRVLKRNKDVLRELKERAQ

SEQ ID NO: 21857 - protein, 60 aa, Artificial Sequence
  Synthetic
SLEEIVKDILRRIKTKADEIKEKVDRSLREIEELVKEIKKEVDDSLRDIERVAEELRREG

SEQ ID NO: 21858 - protein, 55 aa, Artificial Sequence
  Synthetic
ERLLRDVRRILEELRDLVRRLHEDNKRLDEDLNRKVEKLKRDNEDLNKKMRDRAE

SEQ ID NO: 21859 - protein, 60 aa, Artificial Sequence
  Synthetic
SEKEEADKKLKKVMDDLREILRRLLETLKRVIERSEEVLKRLDDRNREVLEEIKRAIERL

SEQ ID NO: 21860 - protein, 56 aa, Artificial Sequence
  Synthetic
EKEAEETVRRMKELVDRIRKKAEEDVKKLREDSKRTADRSKKNVEDLKRRLDELAK

SEQ ID NO: 21861 - protein, 59 aa, Artificial Sequence
  Synthetic
SEIEELVRRLERKLEEHKKMVDKYREDLKRTLDRVNELSKDYIKKLRDILEKAERLVRR

SEQ ID NO: 21862 - protein, 55 aa, Artificial Sequence
  Synthetic
EDLRRIAERVLREAHRTAKDLHRDSERVREEIKKSVDRVHEESERVLREIRKLKK

SEQ ID NO: 21863 - protein, 60 aa, Artificial Sequence
  Synthetic
SIEEEVRKIVDDIRRSSEELEKSVKRVVEEIAESSKEEKDRVKRNIEEIRKEIDKLRRDG

SEQ ID NO: 21864 - protein, 59 aa, Artificial Sequence
  Synthetic
KDVLEKLKRLLDKVVRDSEDVIRKLEERLKKVVDESKEVLKELEELHERVMREVEETIR

SEQ ID NO: 21865 - protein, 60 aa, Artificial Sequence
  Synthetic
KIEEDIRRELTKILDKLRKLLEKAKKNVEDIERSSRDLKRRVDETIEKIKDELRKLERDG

SEQ ID NO: 21866 - protein, 59 aa, Artificial Sequence
  Synthetic
EEVLERAERELRRVMKEVEKVLREIEELHRRVAETSKRVIDELRRLLEKVFKEFEDAVR

SEQ ID NO: 21867 - protein, 61 aa, Artificial Sequence
  Synthetic
SEVDEDLKRLEDRVREYEDRVREDIRRLEEDLKRLRKRIEDSIEEMRRTLEEVKEDVRREG

SEQ ID NO: 21868 - protein, 59 aa, Artificial Sequence
  Synthetic
RDRLTKLREVLERLEKRIREIDEEIKRVLERVEKEIRDALRKIEKVNEDVEKALRDILR

SEQ ID NO: 21869 - protein, 59 aa, Artificial Sequence
  Synthetic
SLEEEIEKVIRKLKEVVERINERNKRALDKLRKVVEEVKDALRRTNEELKKVVKEVERR

SEQ ID NO: 21870 - protein, 59 aa, Artificial Sequence
  Synthetic
KDDVRRLKREIEELIKRIDDKIRKLIRRHEELVREIREELKKHEERVKDVLRKLEKLAE

SEQ ID NO: 21871 - protein, 57 aa, Artificial Sequence
  Synthetic
SEVEKLKKEADEESERNKDEVRKLEKESKENADRIRRHLEEHLKRSDENVKRVKDAK

SEQ ID NO: 21872 - protein, 55 aa, Artificial Sequence
  Synthetic
EEMLRRLEELLRENKKRNKEVLDRDRELLRELDEEVDDVLRRDKELLEELERRLK

SEQ ID NO: 21873 - protein, 61 aa, Artificial Sequence
  Synthetic
SEVDEVLERIERLADDNRRKAETVLRKIARLLEELKKHSEDVNRKIKELVKELEDEVRRAG

SEQ ID NO: 21874 - protein, 59 aa, Artificial Sequence
  Synthetic
RELLERVLRRVEKKSEDHKRKLEEAERRVDKNREDHERRNEELLRRVEERVEDVKRRIK

SEQ ID NO: 21875 - protein, 60 aa, Artificial Sequence
  Synthetic
DEVKEVLKRIKDLLDELRRHSEKVNRDVERLLEELARNSEKVNREIRRLLDDLRRLVEEK

SEQ ID NO: 21876 - protein, 59 aa, Artificial Sequence
  Synthetic
RDDLERILREVDKKIKDLKRENERMLEEVERNAKEHKDRDREELKRVKEDLDRLRERLR

SEQ ID NO: 21877 - protein, 58 aa, Artificial Sequence
  Synthetic
KDAEELEKEVERESRKNEESIRRIREEVDKLSKDNDRKLKEIEKEVEDLRRRVDERRK

SEQ ID NO: 21878 - protein, 55 aa, Artificial Sequence
  Synthetic
EKLLDKIRKVVKENEERMDKLLEDIERVVRENIKKNKEVLERARRVIERLEEKIK

SEQ ID NO: 21879 - protein, 58 aa, Artificial Sequence
  Synthetic
DEDKKLEKDVRDKSEDNKRRLEEIKKKVEDASRENERKIEEIKRRVEEKAEEVDRARK

SEQ ID NO: 21880 - protein, 55 aa, Artificial Sequence
  Synthetic
EELLKTATELVTRNRTENERVLREAERVVKENLRRMDELLKDIRRVIEELERRIK

SEQ ID NO: 21881 - protein, 56 aa, Artificial Sequence
  Synthetic
EEVERSLKKLEDDIRRIERELEEMVRKSKREIDKLVRDLEEMLKDSRRKLEKLRKD

SEQ ID NO: 21882 - protein, 56 aa, Artificial Sequence
  Synthetic
EEAIRELERLLEELLRKIEEVIKDLRRLNKELDEEIKRVIDEARRLNKELEDDLRR

SEQ ID NO: 21883 - protein, 60 aa, Artificial Sequence
  Synthetic
SKVEKILKDIKRLLDELRKKLKEVKDRLDEINEELRETLKRSLDRNRKINEELKDKLRRR

SEQ ID NO: 21884 - protein, 55 aa, Artificial Sequence
  Synthetic
DEVLKRVEEEIRRLEEELDRTLERSKREVEKIKREIERTNRESERAVKEIDDRER

SEQ ID NO: 21885 - protein, 61 aa, Artificial Sequence
  Synthetic
SKDEEVLKTLRRILEELRDVHRRNLEDNKRITDRLREIHERNLRDNRRITKELEEVARRDG

SEQ ID NO: 21886 - protein, 55 aa, Artificial Sequence
  Synthetic
DEKREEVKKEVDETRERNERKNRRSREDVKRVEDRNRDANRKSRKEAEDVKRRLT

SEQ ID NO: 21887 - protein, 61 aa, Artificial Sequence
  Synthetic
SKVEEVLKRLREILKELEEVHKENKDDVKRILRDLEKTHKDNLDDNRRITEKLKRVVERDG

SEQ ID NO: 21888 - protein, 55 aa, Artificial Sequence
  Synthetic
DEEREKVERRAKEARDRNKRKNERVKEEVKRVKDRNKKKNDESKETVRKIEEDAT

SEQ ID NO: 21889 - protein, 57 aa, Artificial Sequence
  Synthetic
SDSERILKDIEDKLREIKKRSDDNRRRLEKENREVEKRVREILRRIEEENKDVERED

SEQ ID NO: 21890 - protein, 55 aa, Artificial Sequence
  Synthetic
EKVKRDLEEALKTLRKVAEDNKKSLRESLETVKKLLEDLERELRKSAESVRRKMK

SEQ ID NO: 21891 - protein, 57 aa, Artificial Sequence
  Synthetic
SESEELLKRAEDEVRKVEKKSRDNERRLREKLKKAKEDLDRIDEDIKRLNKELEDRN

SEQ ID NO: 21892 - protein, 55 aa, Artificial Sequence
  Synthetic
ERLRRELERILEELRELVRRNEEELKKIMKRVREEVEKLLRKLEKSLESVDRKVT

SEQ ID NO: 21893 - protein, 60 aa, Artificial Sequence
  Synthetic
SRDEKAERMVREVEKKIKELIDRNRRVTEKVKEDIKRLIEDLERVTRDVSRAIKELARRL

SEQ ID NO: 21894 - protein, 55 aa, Artificial Sequence
  Synthetic
EEDDKRIEEDLRKLEEDSRRYDEDLKRELERLRKEVEEYKKRMREELRRLKEEAD

SEQ ID NO: 21895 - protein, 60 aa, Artificial Sequence
  Synthetic
SELERATKVVKRVADRIAELIRENARVTKRVADESRKLLEETETVTREVMRAIEELLKRL

SEQ ID NO: 21896 - protein, 55 aa, Artificial Sequence
  Synthetic
EEDLKKLEDDLKRAADESKKYDDDLRRKLDELRRRHEEYKERLKEMLKRLEDETR

SEQ ID NO: 21897 - protein, 60 aa, Artificial Sequence
  Synthetic
SELEDARRVVKRVADRIKRLIEENERVTKEVKEASEKLLKDTKDATRRLAKEVKELVKRL

SEQ ID NO: 21898 - protein, 55 aa, Artificial Sequence
  Synthetic
EKDKKRLEEELERLRESSERYDERLKRELERLEEEHRRYIRRLKEELDKLREDTD

SEQ ID NO: 21899 - protein, 60 aa, Artificial Sequence
  Synthetic
SEVEELIKDIRRHNTRLEKRMREILEDLKRHLKRSEDKMRKLVKELKELLDRLRDIARDG

SEQ ID NO: 21900 - protein, 59 aa, Artificial Sequence
  Synthetic
EKLLKELEDVIRENEKRSRDIARTLEKALEELRKASKELIDTARDILRKVLEDVDRLRQ

SEQ ID NO: 21901 - protein, 57 aa, Artificial Sequence
  Synthetic
SEVETSAERLKREVEKHHKEVEEYIRRLEEELKKMTRDVERALEKIKEDVDRLRKEQ

SEQ ID NO: 21902 - protein, 59 aa, Artificial Sequence
  Synthetic
EELLKRLRDVLEEVSRRIKDNLEELKKVSERLKRRIEELIRRLEKVMRDVRRSAEEIKR

SEQ ID NO: 21903 - protein, 57 aa, Artificial Sequence
  Synthetic
KEVEEDIERLKRILEKHHKDIERAIRRLEEKLKRLEDKLRKYKRDLEEEVARLKDEQ

SEQ ID NO: 21904 - protein, 59 aa, Artificial Sequence
  Synthetic
EKVLRRLKEVLREIEERIRRNKEELDKALERVKRTIERLIRELEKLSERLKRIADEIAR

SEQ ID NO: 21905 - protein, 57 aa, Artificial Sequence
  Synthetic
DEVDEIVRRLRETVDRHHKRIKEAIEKLKEEVKKHHREIEEYIRRLEEEVKRLADEQ

SEQ ID NO: 21906 - protein, 59 aa, Artificial Sequence
  Synthetic
RKLLEKLDRVLKKLEEDIRRNKEALDRALREAEKSLTDNIKELRDVSREIAERIKEITR

SEQ ID NO: 21907 - protein, 60 aa, Artificial Sequence
  Synthetic
DEKEKVIEDIKELLKELEKKLEDIIREIEKELKRNDEENEESRRRIEDMLRRLEELKRRS

SEQ ID NO: 21908 - protein, 55 aa, Artificial Sequence
  Synthetic
EDVDRVLREAERRVREILKELEEVLRRAEERSEENLRSAEKVLREVEKRLKELTD

SEQ ID NO: 21909 - protein, 60 aa, Artificial Sequence
  Synthetic
SEEERIIKRIKETLEDLKRKLDRIREEIERDIRRNNKKNEDSIRDIERMLRELRRLFEES

SEQ ID NO: 21910 - protein, 55 aa, Artificial Sequence
  Synthetic
KELKEVLEEAKKTVDKILRDLEELLRRAEEESRRNLREAEEVLKKVREDLERLAT

SEQ ID NO: 21911 - protein, 60 aa, Artificial Sequence
  Synthetic
SEEEEVIKEIKDALRDLRRRAEELMKELRELIRENNERNKESEREIRRLLDRLRDLKRRS

SEQ ID NO: 21912 - protein, 55 aa, Artificial Sequence
  Synthetic
EEVKRVLDDAKRAVEEILARIKELLDEVRKASKENLERAEELLRDVERELDRLTK

SEQ ID NO: 21913 - protein, 56 aa, Artificial Sequence
  Synthetic
SEVERLIEDIRRANEELNRKSERKSRESKKENDRLNRESDKKSRDSERVLEELRRR

SEQ ID NO: 21914 - protein, 59 aa, Artificial Sequence
  Synthetic
EELVRRLDELLKESETNVRDNKRRVRDNLRRTEENARRNLEKVKKNVRKIDKVIKEIET

SEQ ID NO: 21915 - protein, 56 aa, Artificial Sequence
  Synthetic
SEVDETARKLDEDLKRLEEEVRRTSKESEDENRKLNETSKRESDESKRRLDELRRK

SEQ ID NO: 21916 - protein, 59 aa, Artificial Sequence
  Synthetic
ERVLRKLKDLVEKVKRVIEKLVKELEDNVKKTKDNARRNKREIEENARRIREEIKKLED

SEQ ID NO: 21917 - protein, 56 aa, Artificial Sequence
  Synthetic
SEVEKEADEVRRTNEELNRRSEETSRRSEEDLRRLEEKVRRASKKSEDDLRRLKRE

SEQ ID NO: 21918 - protein, 59 aa, Artificial Sequence
  Synthetic
EEMVKRLRDVVKRSRENIEENKRRIEDNLRRIDEVIRRLIEELRRNMRRIEEEIERIRR

SEQ ID NO: 21919 - protein, 59 aa, Artificial Sequence
  Synthetic
SEVEREIERLEEDLDRLRREVDEAHKRSKKKLEELRKEVEDYEERVKEELRRLEKLVRE

SEQ ID NO: 21920 - protein, 59 aa, Artificial Sequence
  Synthetic
EEVRERLERALRKAEKDVKRLEDELKRSLKEVRETVRELEERLREVNERVEELLDRLRK

SEQ ID NO: 21921 - protein, 62 aa, Artificial Sequence
  Synthetic
RVEDRVRDLIRKHDETSREIEKRIRDSIKRLADVLDKIRKAIDDLIRKLREAVEDLLRKIGK

SEQ ID NO: 21922 - protein, 59 aa, Artificial Sequence
  Synthetic
EKEVEDLARKIEKLNEDLRRRLEKLDKENKDVIRRLEDALRRLAEEIKRLIDELRERAR

SEQ ID NO: 21923 - protein, 56 aa, Artificial Sequence
  Synthetic
KDEDRLRDDIRRAIEEIEEKLKRLKDRNKEHIERLKKRNEDLNRRNRDVVRRLRER

SEQ ID NO: 21924 - protein, 55 aa, Artificial Sequence
  Synthetic
EELEKLREDLRRVIERVEREIRRSSEENRRVVKKSVDNIRDSLRKNEDVIRKLRK

SEQ ID NO: 21925 - protein, 59 aa, Artificial Sequence
  Synthetic
DVEKKIKDLARELREVIDDARRKNRKLHEDAREVSERHEKAVRDLTEELKRVIDELRKR

SEQ ID NO: 21926 - protein, 59 aa, Artificial Sequence
  Synthetic
EDMLREVEKRVKEEIKRIKDDLDEVRKRHEKKVRDIRKHLKELEDRIKKTEKDLREEAR

SEQ ID NO: 21927 - protein, 59 aa, Artificial Sequence
  Synthetic
RVEEEIERLSRDLKRVIEKAKRDNDRLHKEVRKASEDHKRENKRLHEDVKRVIEELRKR

SEQ ID NO: 21928 - protein, 59 aa, Artificial Sequence
  Synthetic
ERMLKKLEDEIEETKKDIEREIREIDKRHKDAVKELRDHIRELAREHEEEKKRLEETAR

SEQ ID NO: 21929 - protein, 59 aa, Artificial Sequence
  Synthetic
RVEEEIRRLLEESERVHKELEDINRRLHEKVDRVSKKHREENKRLHEKLKRAIDRLREK

SEQ ID NO: 21930 - protein, 59 aa, Artificial Sequence
  Synthetic
EEALKKLEKEVKDNERKLREEARRVEEEHEKTVRDLKKHLDELREEHDRILEELERTRK

SEQ ID NO: 21931 - protein, 60 aa, Artificial Sequence
  Synthetic
SDMEKRKRDIKRKLDESNKKSEEAVREVERKLDESNKEVKKKEERVEDELRKLEEKRRRG

SEQ ID NO: 21932 - protein, 55 aa, Artificial Sequence
  Synthetic
EKLKDIERELRENLKRNEDIVREILKKLEDNLRRVEKLAEDIRRKLEKVADDLRK

SEQ ID NO: 21933 - protein, 56 aa, Artificial Sequence
  Synthetic
SELEEDKKRIEETLRRLEETAKEYHRRSREELRRLEEEAKRYHEESKETLDRLRRE

SEQ ID NO: 21934 - protein, 55 aa, Artificial Sequence
  Synthetic
KKLKDIKEEVERVMKKLEDLVRRDNEESEKVLEKLKRLVERNNEDIKRALEELRK

SEQ ID NO: 21935 - protein, 56 aa, Artificial Sequence
  Synthetic
SEDEERLRRIEEELRRLEEEAREYHERSREELKKLREKAKEYHERSRRELEELRRR

SEQ ID NO: 21936 - protein, 55 aa, Artificial Sequence
  Synthetic
KRLKEITRKVEEVMKKLEKLVRDNNEEIRKVMEELKKLVEDDNEESDRALKELET

SEQ ID NO: 21937 - protein, 56 aa, Artificial Sequence
  Synthetic
DEMETRLEDVRKKLDDSRRETRKVEEDIRRTLEELRREAKKYHEDSKEELDDLRRR

SEQ ID NO: 21938 - protein, 55 aa, Artificial Sequence
  Synthetic
EKLKEIKERIEKVLRENRDVVKKIKEDVRRALKELEELVRKNNEDIKRLLDELRR

SEQ ID NO: 21939 - protein, 56 aa, Artificial Sequence
  Synthetic
SRVEEVERRVRDKSRKSKEKLRKLEEDVRRESETSRDRLRKLAEEVKTKVKELKDK

SEQ ID NO: 21940 - protein, 56 aa, Artificial Sequence
  Synthetic
SEDLKRLAKEIEDNLEELERKIREIRKELRRSLEEVEKTVEDLKRELKKVLDELRK

SEQ ID NO: 21941 - protein, 60 aa, Artificial Sequence
  Synthetic
SDIEEAKERLERKLEKLLRKVEEYLKEIADEIRRLEEELEEYNRRSKERIDRVLEVKERG

SEQ ID NO: 21942 - protein, 56 aa, Artificial Sequence
  Synthetic
ESVLKELEELLKELEDRIRKILTESTELLRRLEKRVRDSLRRNTEELDELLDRLEK

SEQ ID NO: 21943 - protein, 59 aa, Artificial Sequence
  Synthetic
SEVEKSEKKLRDEIERLVRENEKYLERIKELVEELLRELEKAVRELEKEVTEIEEVKRQ

SEQ ID NO: 21944 - protein, 56 aa, Artificial Sequence
  Synthetic
ERVLKKLRDLVKEVVDRSKRSLDESTKVLDTLEKEVRKVLEALKDILREALERLDK

SEQ ID NO: 21945 - protein, 60 aa, Artificial Sequence
  Synthetic
SREEIIKKLKEEVERLLRESAKVLEELKRRLEALLRESEEILRELRELVRTLLEKLERDG

SEQ ID NO: 21946 - protein, 59 aa, Artificial Sequence
  Synthetic
EKDLKKTEDDLKREADEHRKAVEDELRKVKKRLEEHRERVRKRLEDIEKTLRDIDREVR

SEQ ID NO: 21947 - protein, 60 aa, Artificial Sequence
  Synthetic
SSVEDLLRKAEEVVRRAEEKSRDSHEKTKDVLRKVKRKSEELNKHNRESIKKVEEVRRRT

SEQ ID NO: 21948 - protein, 55 aa, Artificial Sequence
  Synthetic
EEVLKTIEDLLRKLERKVRETIETDRRLLRKVEEELKRSIEDSRRLVDELKKRVT

SEQ ID NO: 21949 - protein, 60 aa, Artificial Sequence
  Synthetic
SSKDRLRDEIRRVVERVREISERVNKHNRDSVKRVEEESRRINKEIRKVVEDVDRMRRRV

SEQ ID NO: 21950 - protein, 55 aa, Artificial Sequence
  Synthetic
EEVLREIEKLVRDVEREVRESIERSKRLVKELEERVKKSIDEIKKEVDDVERKLK

SEQ ID NO: 21951 - protein, 60 aa, Artificial Sequence
  Synthetic
KEVEDLKEKVKRVVEEVEKISRELNKHNRDSVRRAEKTSKELNDHNKDSIRKVREVLKRT

SEQ ID NO: 21952 - protein, 55 aa, Artificial Sequence
  Synthetic
DKVLKDIKKLLKDVEKKVRESIKESKELVKRLKDKLEESIRRSKKDVEDLKREVD

SEQ ID NO: 21953 - protein, 60 aa, Artificial Sequence
  Synthetic
SSVDKLRKEIREVLRRVERISEESHKHNEESVRKVKERSERLNKHNRDSARDVERVLREV

SEQ ID NO: 21954 - protein, 55 aa, Artificial Sequence
  Synthetic
EEVLEEIRRRLEEVEERVRRDLEESKKLVDELRKRVEKSIRESRKLVDDLRKRVT

SEQ ID NO: 21955 - protein, 60 aa, Artificial Sequence
  Synthetic
SSVDKLKDEVRKVVETVKDLSRRLNETAKRVADRVRKISRETHEEVRKVVEDVKDVRRRT

SEQ ID NO: 21956 - protein, 55 aa, Artificial Sequence
  Synthetic
ETVLEELKRLLDKVREDVRRSIEEIRELLKTVEKEVRDDSRDLERLLKRVEEETK

SEQ ID NO: 21957 - protein, 60 aa, Artificial Sequence
  Synthetic
SSVDRVREEIERVARRVRKLSEDSHREVEKVLKEVEEISKRTHEEIDKVVKEVEKVIRDT

SEQ ID NO: 21958 - protein, 55 aa, Artificial Sequence
  Synthetic
EEVLEEIRRLLETVEREVKTDIDRLREELRRVEEAVKKDSEDIRRKLKRVEDDVK

SEQ ID NO: 21959 - protein, 58 aa, Artificial Sequence
  Synthetic
REAEDIVRRSHELVERAREKLRRLNKDSERLVDEVEKELREVVERVAELIKRAKDEIG

SEQ ID NO: 21960 - protein, 59 aa, Artificial Sequence
  Synthetic
EEVLEKVLRDSERVLKELEEKLRKSLEDVKRVIDEVKKVLEDVKRKVEEVLKRVRDKRR

SEQ ID NO: 21961 - protein, 58 aa, Artificial Sequence
  Synthetic
SRAEKVERESHELVRTLKEELDRVVEKVERLVRRVEEELKRVNKESAELVKELKDRIG

SEQ ID NO: 21962 - protein, 59 aa, Artificial Sequence
  Synthetic
DEVLTKLVKSSRDVIEEIREDLKRVLKEAEEVIRRVKKRLEDSLEKVKEVLRELLRAAK

SEQ ID NO: 21963 - protein, 58 aa, Artificial Sequence
  Synthetic
SSAEDVVRRSHELVRRLEEELDKVNEDSERLVREVEERLKRANEESKRRVEDAKRRIG

SEQ ID NO: 21964 - protein, 59 aa, Artificial Sequence
  Synthetic
EEVLEEVLRRSREVLKKLKEDLKRSLDDAERVIRRVREDLKRSLKRVREVLEEVRRRTK

SEQ ID NO: 21965 - protein, 58 aa, Artificial Sequence
  Synthetic
SSVDRIVEESHTRVRKLMKDLEDVNDESRRRVERLRERLEEVVKEVEKLVEELRRRIG

SEQ ID NO: 21966 - protein, 59 aa, Artificial Sequence
  Synthetic
EEVLKTILERSREVLDRIRKELERSLKEVEDVLRRIEKDLKKVLDEAREIIKRLLDEAK

SEQ ID NO: 21967 - protein, 60 aa, Artificial Sequence
  Synthetic
SRLETVLERAKELIDRIRKLLEDVRRKVKELIDRIRRLNEEANRESEELIRRIEEELRKG

SEQ ID NO: 21968 - protein, 57 aa, Artificial Sequence
  Synthetic
DARRILEEVRKLVKELEEELRRALKEVRDLAKEVDEDSKRALDRNEKLIRDLDRKVE

SEQ ID NO: 21969 - protein, 60 aa, Artificial Sequence
  Synthetic
RELEEAKKKVEDLLRRILEENERAHEESKKLIEEIRRLLKKMNEESEELRERIRKKLEEN

SEQ ID NO: 21970 - protein, 57 aa, Artificial Sequence
  Synthetic
DVERALDDVRRLLREVERRSEELLRTDEEAIRTLKKEIDKVLKENKDKADRLKEEVN

SEQ ID NO: 21971 - protein, 60 aa, Artificial Sequence
  Synthetic
DELETVERRVEKLIEDIKRELRKVHEESKKLIREIKKELEDANRESERVIEEIKRELDRD

SEQ ID NO: 21972 - protein, 57 aa, Artificial Sequence
  Synthetic
DARKMLEDVKKRAKDVEDEIEEVLRRDRELIKELKRELDEALRENRRLIEDLKRKIK

SEQ ID NO: 21973 - protein, 60 aa, Artificial Sequence
  Synthetic
SEAEEALKRVKKAIDDARKLLEEANRKDKKSIEEAEKLLREAHERSKKAIKEAEDALDKA

SEQ ID NO: 21974 - protein, 57 aa, Artificial Sequence
  Synthetic
DAEKALRDAKRLADDLKRTADEVLKENKRTAEDLKRKADEVLERDKKLAKELKEKAT

SEQ ID NO: 21975 - protein, 60 aa, Artificial Sequence
  Synthetic
SELEDVKRKVKRLIEDIERALTEANKEDEKSIEETERLNRTVHEESKELVERLKDELRKR

SEQ ID NO: 21976 - protein, 57 aa, Artificial Sequence
  Synthetic
DVDEALKEVRDRAKKLKDKIKKVLDDNRRTVEDNERKSDELLKTDKELVREVKERTE

SEQ ID NO: 21977 - protein, 61 aa, Artificial Sequence
  Synthetic
RELEKVRKEVERLIKEIKDLNKRAHDETKTRIDRIREKNEKVHEESKRLIREIEELLRRKG

SEQ ID NO: 21978 - protein, 55 aa, Artificial Sequence
  Synthetic
EEVIKEVEKRLDELRKESKKLLDDDRRLIEKLKEESRRLLEEDRRLIKELKEKVK

SEQ ID NO: 21979 - protein, 61 aa, Artificial Sequence
  Synthetic
SAAERAAEEVKKLIDEARKLLERAHRETKKLIDEARKLNKRALDEVRRLIEEADRLLRRDG

SEQ ID NO: 21980 - protein, 55 aa, Artificial Sequence
  Synthetic
EEVAERARRLAEELKKEADDVLRKDRDLARRAREESEEALKEAEKLARDLRRRAK

SEQ ID NO: 21981 - protein, 60 aa, Artificial Sequence
  Synthetic
KEAEDIKRKVEKVAREITEKSRKSHEELRKVVKEARDKSEKSLRDVERVLREIEELLRRR

SEQ ID NO: 21982 - protein, 55 aa, Artificial Sequence
  Synthetic
KDLIEEIKRRLDEVRRRSEDNLKKMEEELKKVEEDSRRVVERIRTELKRVEDEAR

SEQ ID NO: 21983 - protein, 60 aa, Artificial Sequence
  Synthetic
SEAEKIRKDVEKVIREVREDSKRTLERSRKVDEEIRRKSETSHRLVEEVIRRAEELLRRE

SEQ ID NO: 21984 - protein, 55 aa, Artificial Sequence
  Synthetic
EELIEEIKKALEDVKRESEKVKEESRKSLEDVERDSDRNLKDMERLLREVTERAK

SEQ ID NO: 21985 - protein, 60 aa, Artificial Sequence
  Synthetic
DEVEEIRKEVERVIREVEEKSKETLRRSEKVDREAKKKSDDSRRKVEKVADEIRRLLETR

SEQ ID NO: 21986 - protein, 55 aa, Artificial Sequence
  Synthetic
KDVIEEIRRLLDEVRRRSEKVIRDSERSAEEVKERSERVIEELKRLLEKVAREVK

SEQ ID NO: 21987 - protein, 60 aa, Artificial Sequence
  Synthetic
SSVERVERDVARVAREIRKISRDTKEESKEVDRRIDEISKRTNEDVRRVAEEIKRLKEKR

SEQ ID NO: 21988 - protein, 55 aa, Artificial Sequence
  Synthetic
KDVIKEIEDRLREVEEESKKAIEESKTSLKRVKEKSEKNVEDMKKLLEKVREDVR

SEQ ID NO: 21989 - protein, 60 aa, Artificial Sequence
  Synthetic
SEVEKVLDEIRRLLKEVEERSKENNDRNEELARRNTRRSEENIRRIEELLRRVREEARKD

SEQ ID NO: 21990 - protein, 59 aa, Artificial Sequence
  Synthetic
EKFLREVRREIEEIIRRIKEASEKTHKEAKEVVDRINELSRKSHETIKEIIKRVRDRAK

SEQ ID NO: 21991 - protein, 60 aa, Artificial Sequence
  Synthetic
REVDEVLDEIRRLLERVREESEKNNRDNEKLMRDNEDRSRKVIETIKRLLEDVKDRATKK

SEQ ID NO: 21992 - protein, 59 aa, Artificial Sequence
  Synthetic
EKFLREVRREIEEIIRRIRELSERTHREAKEIVDRINELSKRTLDKAKEMLDRAEEKAK

SEQ ID NO: 21993 - protein, 60 aa, Artificial Sequence
  Synthetic
DEVEKVLRDIEKKLEDVERRSKEVIDEIRKLLKEVEEESRRNVKKIREELKKVVDDVRRK

SEQ ID NO: 21994 - protein, 59 aa, Artificial Sequence
  Synthetic
EKFLRDVKRMVDEILDTARELSRRTLEEIKRIIARIRERSEKSHEEARKALRDVEEKAR

SEQ ID NO: 21995 - protein, 60 aa, Artificial Sequence
  Synthetic
DSVREVLKKIEDELERVKRDNKDVNRKNEELMRRNEERSRRVVEDIKRKLKELVDDVRRN

SEQ ID NO: 21996 - protein, 59 aa, Artificial Sequence
  Synthetic
EEVLKRVDEEAEKVLRENEKLSKKSLDEAREIVREINRLSEDTRREADEILERVKEKVR

SEQ ID NO: 21997 - protein, 60 aa, Artificial Sequence
  Synthetic
DEVETVLEKIERLLRKLEKDSREVIKKIKRLLDEAKKESRKNIEEIKKLLEEVKREVDRR

SEQ ID NO: 21998 - protein, 59 aa, Artificial Sequence
  Synthetic
ERFLREVEKELEDMLRRVRKLSEDTERKIREILERIKRLSDDSNRKAKEILREIRKRAE

SEQ ID NO: 21999 - protein, 55 aa, Artificial Sequence
  Synthetic
DELEKVKEEIRRLLRRIEEDVKRSEERNKELLRRITEEVKRSERRNEELLKEIKD

SEQ ID NO: 22000 - protein, 56 aa, Artificial Sequence
  Synthetic
LKKVREDLERMLRRVEEELKRSNEESERAIEEVRRELEDIDRESRKAIEDVLREEK

SEQ ID NO: 22001 - protein, 59 aa, Artificial Sequence
  Synthetic
SEIDEVLTRLRKISKDLNETSDRVNERARKIIDDIKKESKRVNDEAREIVERLKREIDK

SEQ ID NO: 22002 - protein, 59 aa, Artificial Sequence
  Synthetic
KDKVERVVREVEKLHEEDRKRLEESTRSVRKLLEELKRELEKSTRSVKKLVDELRERVR

SEQ ID NO: 22003 - protein, 59 aa, Artificial Sequence
  Synthetic
DEVDEMLKRAEDRIREISDTSRKVNEDARKIVEDLKRDSERVLRELRKRIEELRREIER

SEQ ID NO: 22004 - protein, 59 aa, Artificial Sequence
  Synthetic
EKRVREVAEEVKRLVKELEERLRRSTESVKRLLEDVERAVKESSDEVEKLLRRLREELE

SEQ ID NO: 22005 - protein, 59 aa, Artificial Sequence
  Synthetic
DEIEEVLRDAKRISDELNRRSEEVNRELREIIKELTKRSRKVLEELKKIVRDLEKKIKD

SEQ ID NO: 22006 - protein, 59 aa, Artificial Sequence
  Synthetic
REKAERVLRTVEELHKEDRDRMKESTDSVKRLLEELKRRAEKSSRTVEELLRRLEEKIR

SEQ ID NO: 22007 - protein, 59 aa, Artificial Sequence
  Synthetic
SEIDELLERAKKRSKELNDTSKEVLDRARRIIEEISKTSEEVNKDLERIIRELAEEIKR

SEQ ID NO: 22008 - protein, 59 aa, Artificial Sequence
  Synthetic
EKRVREVLKEVRRLHEEDRKRMKESSEDVERLLTELRKRMKESTDSVEKLLKELEDRVR

SEQ ID NO: 22009 - protein, 59 aa, Artificial Sequence
  Synthetic
SSLEKLLEDVRRRSEELNRRSRKVLEDLKDIIRRLKEESKRVLDEAKKKVDDVERKIDK

SEQ ID NO: 22010 - protein, 57 aa, Artificial Sequence
  Synthetic
KVRKALEDVRRLHEEDKRRVDESSKEVERLLRELREDMKRSSEEVERLVKRVRDRLK

SEQ ID NO: 22011 - protein, 59 aa, Artificial Sequence
  Synthetic
SEADELLKEVKRISDELNDTSRRVLEELREISRRLNEDSKRVLKELEDILEEIRERIDR

SEQ ID NO: 22012 - protein, 59 aa, Artificial Sequence
  Synthetic
EERVRELVERVKELHEEDKRRMDDSSRDVERLHKEDADSARDSSRKVRELLEELRRRVE

SEQ ID NO: 22013 - protein, 60 aa, Artificial Sequence
  Synthetic
KELEDVLRELKRILEELEKLSREADERSKEIVKRLVEETTRSLKEVKEIVERLKELDDAG

SEQ ID NO: 22014 - protein, 59 aa, Artificial Sequence
  Synthetic
EKRAREVRETVRKLVEDVKKKNEESERRNRELVKEVRKRNKEVRDRSRKLVKELEDKLR

SEQ ID NO: 22015 - protein, 60 aa, Artificial Sequence
  Synthetic
SSLEKVLKDLRKILEDLRREIKTVLDDLRRILEELKRETERVDKKSKEIIETLSELRKAG

SEQ ID NO: 22016 - protein, 59 aa, Artificial Sequence
  Synthetic
KKKVDEAIREVEKLIEELRRDLDRVRKTVEKLVRDLERRNEESKRRNEKLVRKLEEELR

SEQ ID NO: 22017 - protein, 59 aa, Artificial Sequence
  Synthetic
DELETVLRKLEKLVRDLKKRSTDVLRRLEEIVKELTDETKRVDDESRDILRRLKELRDR

SEQ ID NO: 22018 - protein, 59 aa, Artificial Sequence
  Synthetic
KEEADRVITTVEELVKELRRRNEEVKERVEKLARELRRRNEESIKTNEKEVRELEKRLK

SEQ ID NO: 22019 - protein, 60 aa, Artificial Sequence
  Synthetic
STLKKVLDENRKSIKELLDMSRRVLEKLREILRRLEEETREVDEKSERIVTTLEELIKAG

SEQ ID NO: 22020 - protein, 59 aa, Artificial Sequence
  Synthetic
EDKAKKVIDEVRKSVKRLEEENERVLRDVERLVREVEKKNRESEKRNRKLVEELRRKLK

SEQ ID NO: 22021 - protein, 60 aa, Artificial Sequence
  Synthetic
SVLEEVLKKLEKILRELKREIEEVLKKLRRILEELVRETEKSLEKVDRIIKELEKLIEAG

SEQ ID NO: 22022 - protein, 59 aa, Artificial Sequence
  Synthetic
EKKAREVTKTVEKLIRELRKTLEDVKREVRKLVEEVKRRNKDVERKSRELVKKLEERLR

SEQ ID NO: 22023 - protein, 60 aa, Artificial Sequence
  Synthetic
STLEEVLERNKESIERLRKESEDSHRKLKEIMERLKRETERSLEEVEEIVKRLKELTDEG

SEQ ID NO: 22024 - protein, 57 aa, Artificial Sequence
  Synthetic
KVKRVIEKAKKSVEDLERRLREDEEAAREWVKKLRTENEKVRKRSEELVRELEERLR

SEQ ID NO: 22025 - protein, 59 aa, Artificial Sequence
  Synthetic
STLEKVLRDLRKILEELLRMSKKVLEELKRLADRLKEEIKKSLDKVKKIIDELRDLTRK

SEQ ID NO: 22026 - protein, 59 aa, Artificial Sequence
  Synthetic
EDKARKVIEEVTREVRRVEEENKKVERTVEKLVEELEETVREARERSERLVRTLEEELR

SEQ ID NO: 22027 - protein, 60 aa, Artificial Sequence
  Synthetic
SDAERVEKEIREVLKRVEDLLRRVNEETKKVAKEVRELLKEVDDRSREIMKRVAEKLRRI

SEQ ID NO: 22028 - protein, 55 aa, Artificial Sequence
  Synthetic
KDVAREVEKLLRELEKKLEEVNRHDKKLLEELEERLKESEERNRRLLEELKRRLD

SEQ ID NO: 22029 - protein, 60 aa, Artificial Sequence
  Synthetic
REVEEVLKRIEELIRRSEEETREVNERTKKLAEDVRRLLEEVDRRSKKIADEVRELLERI

SEQ ID NO: 22030 - protein, 55 aa, Artificial Sequence
  Synthetic
KDLVRTVEELLKRNEEDLRRVNEHDKKLLEDLTRSLERSEERNKTILEKLKEDLR

SEQ ID NO: 22031 - protein, 60 aa, Artificial Sequence
  Synthetic
SDAEKVLDEIRKRIEESEKRTKEVNDRTREVLDRVRKLLEKVNKESRKVAEDVREAAERI

SEQ ID NO: 22032 - protein, 55 aa, Artificial Sequence
  Synthetic
EEVRKDVERLLRENERSLREVNRHDEALLRELEKRLEEVNRHDDKLVKDLRERER

SEQ ID NO: 22033 - protein, 60 aa, Artificial Sequence
  Synthetic
DEVREILEDVKRINKEVEDELRKIEEEIREIVKTVRDESRKTLEELERILRKVEDDLRKD

SEQ ID NO: 22034 - protein, 55 aa, Artificial Sequence
  Synthetic
EEAVKDNERLAKETEDKVREVVKRIRKIIEEVERTARESERRLRKLLKEVEDRAR

SEQ ID NO: 22035 - protein, 60 aa, Artificial Sequence
  Synthetic
EEIERILEELRRIAKKVEEDSRRTLETVRRLNEEVKRRLREILEEIRRVAEDVRRKLDEK

SEQ ID NO: 22036 - protein, 55 aa, Artificial Sequence
  Synthetic
EDVKRELERILEEVRKKSREALEKNKRLLEDTRRVVEEVKRELEKILRDVKRKVD

SEQ ID NO: 22037 - protein, 59 aa, Artificial Sequence
  Synthetic
SVVEELRDELRRAEEENRKIVEDTTRRLEDMIRRDEKINEEVERRLEEVTRRVEELRKQ

SEQ ID NO: 22038 - protein, 59 aa, Artificial Sequence
  Synthetic
ERKAREMEKEVTEILRRLEEENKRDLDRIKKLLDELRKKNEDTLRRIRRLLEEVRERLR

SEQ ID NO: 22039 - protein, 57 aa, Artificial Sequence
  Synthetic
SSLDEVLERLRKLLKEIEDKVRRINEEVKKSSEDVERELKRVVDELKRRVERLKEEV

SEQ ID NO: 22040 - protein, 59 aa, Artificial Sequence
  Synthetic
ERELEKILRDAERVVREIEKRHRDLLEELKKANEDTRRALDEIRKEAERVLERVREEAK

SEQ ID NO: 22041 - protein, 57 aa, Artificial Sequence
  Synthetic
DEVEEVLKRLRESSEESKRRADDVTRRAEESSRRVHKRSREVVERLKKLVEEVERRV

SEQ ID NO: 22042 - protein, 59 aa, Artificial Sequence
  Synthetic
RRELEKLEREMRDVDRRTDEALERLLRTLEEVNKRTDEENKKILEDLKRVVEEVEERDR

SEQ ID NO: 22043 - protein, 57 aa, Artificial Sequence
  Synthetic
SEIEKVIEELRRSSEESHKRSRKVEEDARRSSDEVHRRSREMLRKLREEVKDVERKV

SEQ ID NO: 22044 - protein, 59 aa, Artificial Sequence
  Synthetic
RRDLRRLREEMRRVDERTTRENEKILRELEEVNKETIKENERLLRDLKRVVDRVREEDR

SEQ ID NO: 22045 - protein, 57 aa, Artificial Sequence
  Synthetic
RRIEEVIKEARKSSRESHEESKEVMERLKRSSDDSHRKSEEVLRRLRKLVEDVERRV

SEQ ID NO: 22046 - protein, 59 aa, Artificial Sequence
  Synthetic
DRELKKLRDELKRVDDETRKANEEILREMEEVDKRSKEANDRLLEELAKVVKRVDDEDR

SEQ ID NO: 22047 - protein, 57 aa, Artificial Sequence
  Synthetic
KDIEEVIRRLRESSKESTKRLRDVVEDLKRSSKEVHDESEDVLRRLEELVRRLKKKV

SEQ ID NO: 22048 - protein, 59 aa, Artificial Sequence
  Synthetic
KRLLKELEDRMRRVDERTDEELEKIRKRMKEVDDRSRDVNRKLAEDLKRAIKRVDDEEK

SEQ ID NO: 22049 - protein, 61 aa, Artificial Sequence
  Synthetic
DEVREVLRRDEELHRELKERIDRILEELERLHRDLKRKIDRVLEELKRLHEDVKRELDKRG

SEQ ID NO: 22050 - protein, 59 aa, Artificial Sequence
  Synthetic
EEALRKLHEESKKSVRDVEKELEELRRENKKVIEDLEDELRRLLEENKRAADELRKRAE

SEQ ID NO: 22051 - protein, 61 aa, Artificial Sequence
  Synthetic
DEVEKVKDDVRKLVEKVKRDAKRAHEDNERKHRKLKKELDDALRELKKRHEELKRRIDDRG

SEQ ID NO: 22052 - protein, 59 aa, Artificial Sequence
  Synthetic
DEALRRLKEELDKMIEDVRKELRKLNEDSDDSIRRVKKRLKELRDENEKVIRDIRRETE

SEQ ID NO: 22053 - protein, 60 aa, Artificial Sequence
  Synthetic
SELEKVRKKVEDISRESEKHLREVKKENDRIIKEIEDELRKLLTDVEREIREVEKRIREE

SEQ ID NO: 22054 - protein, 58 aa, Artificial Sequence
  Synthetic
EKAKRVFEEIERIVRRNKEELRRILKELRELHEEVKEKIKKVLEDVKRLVDELLERAK

SEQ ID NO: 22055 - protein, 60 aa, Artificial Sequence
  Synthetic
SELEKVLRDVREAIKRNEDLLRRVHEESRRISEESEKNLRRVHERSRRIAEDVRRVLRER

SEQ ID NO: 22056 - protein, 58 aa, Artificial Sequence
  Synthetic
EEAEKVAREAKKLVDDLKRKNDEVLDEDRKEVERNERELERVLREDKKLLEDLEREIK

SEQ ID NO: 22057 - protein, 60 aa, Artificial Sequence
  Synthetic
DFAKKLEDEARRVSEESRRHLEDLLRRSKESIDALKRKLEDMLRRVREVIKRIEDELRRE

SEQ ID NO: 22058 - protein, 55 aa, Artificial Sequence
  Synthetic
ERVIERIKELLDRNRKELEDVARDAERLNRELNERVDRVLKEVEERLKELEDRVK

SEQ ID NO: 22059 - protein, 60 aa, Artificial Sequence
  Synthetic
DKAKELEEEIRKIIREIEELLRRMEETSRKSSKESEKHLRDAHEDSRRIAERIKDLLRKE

SEQ ID NO: 22060 - protein, 55 aa, Artificial Sequence
  Synthetic
EDVIRELERLLRELKKRIEDVVRRIKELNEDNNRKVEKIREDDERLLEKVRRDVK

SEQ ID NO: 22061 - protein, 60 aa, Artificial Sequence
  Synthetic
SAAEDVLRKVEKIIKEIEELLKRALEESRKSVKELEKILRDAHEKSRKIAREIEDALRKR

SEQ ID NO: 22062 - protein, 55 aa, Artificial Sequence
  Synthetic
DEVVEEIKRLLEELRKKIEDVADEIRRLNEEVNKKLDDLVKTDTKLLEDVDRKVK

SEQ ID NO: 22063 - protein, 60 aa, Artificial Sequence
  Synthetic
SAAEEVRKKNEKISRELEKLNRKALEDSRDSIRKLKKILDDAHKDSREIIKEIEDLLRKR

SEQ ID NO: 22064 - protein, 55 aa, Artificial Sequence
  Synthetic
DEVVEEIKRSNDENNERSKKVLDEIKKLNKEVNDRVEELLERDKRELERVKRDVD

SEQ ID NO: 22065 - protein, 60 aa, Artificial Sequence
  Synthetic
DEFRDIEERAKELAEENETINRRVLTEHKKLIDELREILERVLREHEKRLKDLKDLVRKI

SEQ ID NO: 22066 - protein, 55 aa, Artificial Sequence
  Synthetic
EEILERIRKLLEDVEEKVKKSVEDSRRLLKTIREEVERVLDTSRKLLKRLEDDVR

SEQ ID NO: 22067 - protein, 61 aa, Artificial Sequence
  Synthetic
SDLEEVEKRAEEIIRRNKEELEKVLRESKDIIDKNRKLNKESLDEVKRIIERLEDLLRKDG

SEQ ID NO: 22068 - protein, 58 aa, Artificial Sequence
  Synthetic
EEVRKVAKKIRDEAKKSHDESKKLNDTSRDLVRKSKEEAERIDEEMKKLLKEIKDKVR

SEQ ID NO: 22069 - protein, 60 aa, Artificial Sequence
  Synthetic
SEVEEILKRIEDLARTLLKLNEDSLRRNEEIIRTIKELNEKTLKENKEIIDRLRELLRRT

SEQ ID NO: 22070 - protein, 55 aa, Artificial Sequence
  Synthetic
ERVLKEIEDLLREVADRSRKFNERSERLLREVEERSREVNDRSKKLMDTIAKEVK

SEQ ID NO: 22071 - protein, 58 aa, Artificial Sequence
  Synthetic
SEVEKALERVKKLAEDLERLDKESLERVEKVIRDAERLDKTSREEVKKIADEADDLRR

SEQ ID NO: 22072 - protein, 55 aa, Artificial Sequence
  Synthetic
EEVLRRIRRLLEEVRKKVEDSNRELKRRLDELEKRVRDSNKEIRELVKEVERKVN

SEQ ID NO: 22073 - protein, 60 aa, Artificial Sequence
  Synthetic
SRLEEVLRRIRKLLRDNKETAKRVLEEIERLLREADKRNREALKEIEKRMREVEDKLRKA

SEQ ID NO: 22074 - protein, 59 aa, Artificial Sequence
  Synthetic
EKDLEELRRRVKEVSDESRKLLEDLLDEARKVLEENRKLVEEILREAKKVIDEIEEKLR

SEQ ID NO: 22075 - protein, 60 aa, Artificial Sequence
  Synthetic
SELEKVLREIRRLLDEARKRNEEFLRRIEELLRRNEEEVRRVLEKIERKVERVKRDLERR

SEQ ID NO: 22076 - protein, 59 aa, Artificial Sequence
  Synthetic
EEKLERILRTARKVVEDNERLVREVLKKVKRVSDESRRLLEEIDREVDEVIKRLEERAK

SEQ ID NO: 22077 - protein, 59 aa, Artificial Sequence
  Synthetic
SEAEEIRRRLEEISRRSVEHLRKVLEEIKRISERSKRHLDRVLEENKRRLEELRELLER

SEQ ID NO: 22078 - protein, 56 aa, Artificial Sequence
  Synthetic
EEVLRELEELLKESEERIKRIEEEIKKIIDKSREDIKRVLEEIERLNKKAADDLRK

SEQ ID NO: 22079 - protein, 59 aa, Artificial Sequence
  Synthetic
DEVREVLEELKRISDDSIRHLEEVLRRLREIIERLKATNDDVLRELEEIIRTLLDLDRQ

SEQ ID NO: 22080 - protein, 56 aa, Artificial Sequence
  Synthetic
KEALDTLERTVEESKKRIKEILDRVKELIDKAREDSKRSVEEVRRRIEKARRDLDR

SEQ ID NO: 22081 - protein, 59 aa, Artificial Sequence
  Synthetic
SKVDELLKRLEDIIRKLDKENEKVLRELEEISKRSVDHLKRVLEENRRILEELERLLEG

SEQ ID NO: 22082 - protein, 56 aa, Artificial Sequence
  Synthetic
ERVLRDLKRLVDEARRRSERSLEEVKRIADESRKEIERILREIEEENRRAKDKLRR

SEQ ID NO: 22083 - protein, 59 aa, Artificial Sequence
  Synthetic
SRAEDLLRRLEKIIRDSLRHLREVLKRLERIIDELRKTNERVKEELERIIDTLRKLKDN

SEQ ID NO: 22084 - protein, 56 aa, Artificial Sequence
  Synthetic
EEILRRARELVDESRRRLEKVVKEVRDVIRTLKKDSDKSLRDLEEEVRKAEEDLRK

SEQ ID NO: 22085 - protein, 59 aa, Artificial Sequence
  Synthetic
DEVRELLDTLRRIIERSVKHLEDVLRDLKRIIDKLREDNRRVLEENRRRLEELDKLRKE

SEQ ID NO: 22086 - protein, 56 aa, Artificial Sequence
  Synthetic
EEFLRDVERLAEESRRRLEAVEREVERLITEAEKESKKSLDEVERLNRELKERLKK

SEQ ID NO: 22087 - protein, 60 aa, Artificial Sequence
  Synthetic
DVEDILRTIRDLIRRVDEKSRKTLEENRRAIEEVLRRSDETLRRNKKLIEDVEEEVRRTV

SEQ ID NO: 22088 - protein, 59 aa, Artificial Sequence
  Synthetic
REFMETVLRKIKEDIERLEERNREVHEKSREEIRKLEEENEEVHRKSRKEIDEIRKELK

SEQ ID NO: 22089 - protein, 60 aa, Artificial Sequence
  Synthetic
DVEEILKEIRKRIEDVKRESEKTLKEIRDLIKKVAEDIERSVKENRELIDKVRRELERDV

SEQ ID NO: 22090 - protein, 59 aa, Artificial Sequence
  Synthetic
RKVLTDVLKEIERRIDELRRRNEEVVEKIKREIKKLEDESKRVNDESREIIKRIKEEVD

SEQ ID NO: 22091 - protein, 60 aa, Artificial Sequence
  Synthetic
DVEEIIREIRKLIEKVLRDVRRSAEENKKLIDEVKRRVEEMLKRNRDMIKKVLDDVRREV

SEQ ID NO: 22092 - protein, 59 aa, Artificial Sequence
  Synthetic
REFLKKVLDEIREIIERLRRESEKVNEDSKREIKDIERELREVHKKSRRIIRRIEEKLR

SEQ ID NO: 22093 - protein, 60 aa, Artificial Sequence
  Synthetic
DEAREVLERLKKISEEDKRRSDKVNEETRRIIKEAEERSRKVNEETKRIIEKLEEDLRDR

SEQ ID NO: 22094 - protein, 56 aa, Artificial Sequence
  Synthetic
EEILRELREILRENTERVERSLRDNRRLLDELRKKVERSAEENERLLREAEEKLRK

SEQ ID NO: 22095 - protein, 60 aa, Artificial Sequence
  Synthetic
SEVDKVLDDSRKSAEDLRREIETVLKRNKELIDENRKRLKEVLDRNAKLADDLRRERKKG

SEQ ID NO: 22096 - protein, 56 aa, Artificial Sequence
  Synthetic
ERVVRTLEKLIEEWRKAVEDVLRTLEKLTEEAKRESERILEELKRITKELRDEERR

SEQ ID NO: 22097 - protein, 59 aa, Artificial Sequence
  Synthetic
SEVEDVLRRLEELLRRLEKKSRESLEELRRRLDEVRKDSERSNEDSERLIRELEEIRRK

SEQ ID NO: 22098 - protein, 56 aa, Artificial Sequence
  Synthetic
KEFLDTMRRIVEELKKRLKEVNDRIKDIVRRAEEELKRSNDENKERIERAEKKVRD

SEQ ID NO: 22099 - protein, 59 aa, Artificial Sequence
  Synthetic
SELEKVLEELKKLLEELERESDTSVKELRTLLERLEEESKESNERSKRLAEELERRLKD

SEQ ID NO: 22100 - protein, 56 aa, Artificial Sequence
  Synthetic
REFLETMERIIEELEKRLREVNEDLKRIVRTVAERLKKSNRDNRELIRTLKDRVRT

SEQ ID NO: 22101 - protein, 59 aa, Artificial Sequence
  Synthetic
SEVEDVLRRLEELLRRLKEKSKKSNEESKKLIKELKEESDKSRRDLERLLEKLDRDLKR

SEQ ID NO: 22102 - protein, 56 aa, Artificial Sequence
  Synthetic
REVLERMRELVEKLKEDLERSNKENKDLIDKVKRDLEEVNRRLEKIVREVKERVRT

SEQ ID NO: 22103 - protein, 59 aa, Artificial Sequence
  Synthetic
SEVEDVLRRLRELIEELRERSERSNEESKRLADELEKRSEESLRRLAELLRKLEEDLRR

SEQ ID NO: 22104 - protein, 56 aa, Artificial Sequence
  Synthetic
REVLTTIAKIVTDLERELRKSNEENKKLIDELRKRLEDSNKRVKEIVKRLEEEVRR

SEQ ID NO: 22105 - protein, 60 aa, Artificial Sequence
  Synthetic
KDVEEALKELERVLEELKRLSKELLDRLRELADRIRRISKELLEELKRLLKDIKETVDRI

SEQ ID NO: 22106 - protein, 56 aa, Artificial Sequence
  Synthetic
EDVLRRLRELIEKVKRDLDRTDETLKELIKTLEDELRKSNETIEDLIRRLEEALRK

SEQ ID NO: 22107 - protein, 60 aa, Artificial Sequence
  Synthetic
SDLERLLDELRKLLDDLRRKSEELLRRLDTLAKKIEREAEKITKDNKELIDRLRDRLRRI

SEQ ID NO: 22108 - protein, 56 aa, Artificial Sequence
  Synthetic
ERMLRTLERLIEKLKEELKRTDKELERLIRELKKRLDDNNRRNEELIKRVEDELRK

SEQ ID NO: 22109 - protein, 60 aa, Artificial Sequence
  Synthetic
SEAETVLEEMKEVSKRTEEKNKKVEDDDKRSIDELRKKLEKVLREDRRSIEDLERRLKEN

SEQ ID NO: 22110 - protein, 56 aa, Artificial Sequence
  Synthetic
EEVLRTIERLSRENKKKDEDTLRKSKEEHERVREELERVLETSRREHEKVKKRLED

SEQ ID NO: 22111 - protein, 60 aa, Artificial Sequence
  Synthetic
RVEEMLERLRRLHEEVKRRIDEVLRELEEESKRNEERIRRVLERLRDEHRKLKETLDRRN

SEQ ID NO: 22112 - protein, 59 aa, Artificial Sequence
  Synthetic
EEELERLERKSRESIERLKDTLRELKERLKRISDRSDEKLREAEKRSRESIEEVKKRAK

SEQ ID NO: 22113 - protein, 60 aa, Artificial Sequence
  Synthetic
EVEDVMREARKLHKELEDKIRDAARRIRETIDRVKKEDDDSLRKLRKLHEDLKRELEKRN

SEQ ID NO: 22114 - protein, 59 aa, Artificial Sequence
  Synthetic
RDELRKLLEDSKRSIEKVEDDLRKLEEKIKRVIDDNRRKNKELEEKSRKSIRDLEEEVR

SEQ ID NO: 22115 - protein, 60 aa, Artificial Sequence
  Synthetic
EVEDVLRELRKEHDDLRKEITDVLRRLEKLHRELDEEDERSVKRIRELIEEVMRELRKRN

SEQ ID NO: 22116 - protein, 59 aa, Artificial Sequence
  Synthetic
RKDLKALKEDSKRSIDDIRRKLEEARRRSERSIDENRKLNKRVIEKIREIIRRLEEKTK

SEQ ID NO: 22117 - protein, 59 aa, Artificial Sequence
  Synthetic
EVEDVLREAERLHRTLLKEIRDALRRLRKLIEDVKRKDDESLKRLREKLERLKESLERN

SEQ ID NO: 22118 - protein, 59 aa, Artificial Sequence
  Synthetic
REELKKLLEDSKRSLDELRRRLKEVEDRVREAIKKNEDENRKLERRLDKIIEDLERRVK

SEQ ID NO: 22119 - protein, 60 aa, Artificial Sequence
  Synthetic
SEAEKILKEIRDISDRTREELKKVKDEHKTLIDRLREILERALREHDRLAKELEDIKRKI

SEQ ID NO: 22120 - protein, 56 aa, Artificial Sequence
  Synthetic
EEVLREISKIIKDNHDEVTEVLKESEELIRRLRKEVEDVRRTSEKLIRELEERVRE

SEQ ID NO: 22121 - protein, 58 aa, Artificial Sequence
  Synthetic
SEVDDVLRRLEELIKTLEDINRKSLEDIKKLIDDLRKILEDALRKHEKLIRELREMKK

SEQ ID NO: 22122 - protein, 56 aa, Artificial Sequence
  Synthetic
KEFLDRMREEIRRLEEESRKSDETIERLIRELRRRVEEVLKTSTDLIRELEEEVKK

SEQ ID NO: 22123 - protein, 61 aa, Artificial Sequence
  Synthetic
SSVERVLEAVKELAKKLAEDIRRSLEHIRRLLEEVEKKHRDSKEHVRKLLKDLRDIAREKG

SEQ ID NO: 22124 - protein, 59 aa, Artificial Sequence
  Synthetic
DKELKKILDELRKLIRKVLEALRELNKRAKEILDRVAENVKEVNERLERLVRRIAEEIR

SEQ ID NO: 22125 - protein, 61 aa, Artificial Sequence
  Synthetic
SSVERVKEEVEKLLEKLEREIRKSLKTIRELLRELKRKHEESKEHVRRLLEKAEREARRRG

SEQ ID NO: 22126 - protein, 59 aa, Artificial Sequence
  Synthetic
DKKLEEILRRAKELIDRVLEELKKLNEELRRIIEEIVRNVKRVNEKLEKLLRDIKRRID

SEQ ID NO: 22127 - protein, 61 aa, Artificial Sequence
  Synthetic
SSVEEVLRRVKELLKTLKKKHEDSKRTVKELLDDLRKKHEDSKRHVRKLLEELEKRARERG

SEQ ID NO: 22128 - protein, 59 aa, Artificial Sequence
  Synthetic
DKELKRILEEVKELVKRVLENVERVNREVRERLKEVSRNVERVNKEAKELVDEVEERAR

SEQ ID NO: 22129 - protein, 61 aa, Artificial Sequence
  Synthetic
SSVEEVRKRVRDLIKRYREEVEKIKKDVRRLLDELREEVKRSLDHVRKLMEELRRKIKRDG

SEQ ID NO: 22130 - protein, 59 aa, Artificial Sequence
  Synthetic
DKELKRILDELKERLERAKRENEDSVRKLRKLIEEILREIRRLNKEAEDLIREIEERAR

SEQ ID NO: 22131 - protein, 61 aa, Artificial Sequence
  Synthetic
KDVEEVLTRVRELLRRVEEEIRRSEEHIRRLLEELRRKHEESKDSIRKLLEDLEEKVRRRG

SEQ ID NO: 22132 - protein, 59 aa, Artificial Sequence
  Synthetic
RKDLEEILREVEKLVEEVERRLRKLNEELKEILRTIVENVERVNRRLEELIRDIKRRVK

SEQ ID NO: 22133 - protein, 57 aa, Artificial Sequence
  Synthetic
SEVEKIVEEVKKIVEEVERLHRKLLEDLRRVVEEVEDRSRRINEEAKKIVEDLKRRG

SEQ ID NO: 22134 - protein, 55 aa, Artificial Sequence
  Synthetic
EEVLKEIEDRLERLRRRAEEVNDTARKIVREVEESLKRSVESLKKLVDELRETLR

SEQ ID NO: 22135 - protein, 57 aa, Artificial Sequence
  Synthetic
DEVERLLEEAKKIVEEMKRLHEEILREVEEIVRELDEKHDKLLRDAEEIVKELKKEG

SEQ ID NO: 22136 - protein, 55 aa, Artificial Sequence
  Synthetic
EEMRRRLEKLVRDLREKSREVNERIDKLLEELHEKSERVKKTIDDLVEEVKDTLT

SEQ ID NO: 22137 - protein, 57 aa, Artificial Sequence
  Synthetic
KEVEDILREVKKIVDELLRRHRELLERARRIIKRLKEEHDRLLKELEEIVRDLTRKG

SEQ ID NO: 22138 - protein, 55 aa, Artificial Sequence
  Synthetic
EEILRRIEELLKRLRDDAKRVNDELKRLVEELRKRSKEVNDELRRLLKELEDRLR

SEQ ID NO: 22139 - protein, 57 aa, Artificial Sequence
  Synthetic
SEVEEILKEVERRVDELTRRHEELLRKADEIVKDIRRKLEEINKRLKDIADDVRRKG

SEQ ID NO: 22140 - protein, 55 aa, Artificial Sequence
  Synthetic
EEILRRIETLLEELERRSKRVNDELEKLVRELKEELERSKRSIDEILKKVSKDLK

SEQ ID NO: 22141 - protein, 57 aa, Artificial Sequence
  Synthetic
DEVERLLEDLREKVKRLVKKHEDILREVEKEVRRILRTSEEINREAEEIIRELDKRG

SEQ ID NO: 22142 - protein, 55 aa, Artificial Sequence
  Synthetic
EDVLRDVDRLLRELREKSKEVNKRIKELLDKLKTDLERSKEHLERLVKTLKDKLR

SEQ ID NO: 22143 - protein, 57 aa, Artificial Sequence
  Synthetic
DEVEDLVRKLKKRVDDLLAEHKRLLDEAEKIVREVLKKSRESNERNKKVSKEVRERG

SEQ ID NO: 22144 - protein, 55 aa, Artificial Sequence
  Synthetic
EEVLKTLDRLVEELRKASEDVNRELDKLLKDLEKKLRDSIRHLEENHKDVRRALE

SEQ ID NO: 22145 - protein, 60 aa, Artificial Sequence
  Synthetic
DEVEKVLKEIRKRVEDSLRHLEKVNKEAREIVEKVREELRESNERLREIVKTIRDRLEKL

SEQ ID NO: 22146 - protein, 55 aa, Artificial Sequence
  Synthetic
EDVRRTVEELVRRSEKAIEDSRRSIEDLVRRLKEDIERSLRSVEKLVEELTEAIR

SEQ ID NO: 22147 - protein, 61 aa, Artificial Sequence
  Synthetic
SEVEKVLEELRRIVTKSARHLDESNERLKEIIRRLDEKNKEALKRAEDIIRDIDDKLKKLK

SEQ ID NO: 22148 - protein, 55 aa, Artificial Sequence
  Synthetic
KKVKDEVKKLIDDSREKIKRSRESVKRLVEEHRRRSEEVRKTLEKLAREITERIR

SEQ ID NO: 22149 - protein, 57 aa, Artificial Sequence
  Synthetic
DELEEVADEVRKIIEDLERRLREVVKTSEKLNKENRRRTEDVEKEVEKILRELEEKL

SEQ ID NO: 22150 - protein, 59 aa, Artificial Sequence
  Synthetic
DEDIRKVLKELREIIKEVEDMLKEVLDRNRKLIEDNLRRLKEVLDRLRKKVREIEEEAR

SEQ ID NO: 22151 - protein, 58 aa, Artificial Sequence
  Synthetic
SEIEEAEERVRRLIERNKRETDRVAEEVKRINDENRRATEKVKRDVKRILDDLRRKLE

SEQ ID NO: 22152 - protein, 59 aa, Artificial Sequence
  Synthetic
DKLLRDVLRDLERLVRKNLEELKRVLDELKRLMEDNLRRLEKVLEELERLVREIVERAR

SEQ ID NO: 22153 - protein, 58 aa, Artificial Sequence
  Synthetic
EELERVAKKVRDINRRNKEETKRVEDEVRRLIKENEDTSREVVRRNEEILKDLERKLG

SEQ ID NO: 22154 - protein, 59 aa, Artificial Sequence
  Synthetic
RDVVREVLERLKELVKRNLDKLKRVLDEIRRLIEENLDELRRAHEEHRRIAEDIRRKAK

SEQ ID NO: 22155 - protein, 57 aa, Artificial Sequence
  Synthetic
ESLERVKEEVKKILEKNRRTSEEVARRVKELIDRNREKSKDVARKNEKILEDLERKL

SEQ ID NO: 22156 - protein, 59 aa, Artificial Sequence
  Synthetic
EEEVERVLRRLRELVRENEKRLKEVLDEIRRLIRENEEKLEKAHREHKKLAEEVERRKR

SEQ ID NO: 22157 - protein, 59 aa, Artificial Sequence
  Synthetic
DDVERVLKEVRELVERANEEIRKVLERDRKSNEDANRKIREVLRRVEELVDRIDKIRRE

SEQ ID NO: 22158 - protein, 55 aa, Artificial Sequence
  Synthetic
DEVVKKIKELLDRHRKTTEEVLERIRRSLEKHRRDSEEVMKELRRLVKELEDRTR

SEQ ID NO: 22159 - protein, 59 aa, Artificial Sequence
  Synthetic
DEVRELLRTIEELVRDANRKIKEVLDRDRESNDRANKTLEEILKRDKRSNEDVEEKLKK

SEQ ID NO: 22160 - protein, 55 aa, Artificial Sequence
  Synthetic
KKVEKKIRDLLKKHEEDSRKALEDIKRSLERHRERSEEVLKRIRDSLRELDKKTK

SEQ ID NO: 22161 - protein, 59 aa, Artificial Sequence
  Synthetic
DSVEEILKRVKELVDKANEKIKEVEERVRRSDEELKKILEEILREIEKLVREVEEIARR

SEQ ID NO: 22162 - protein, 55 aa, Artificial Sequence
  Synthetic
DEVKKKIKDLLEKHERDSRKVLRKLEESSKETEDRAKEVLERIEKLLEDLRRETK

SEQ ID NO: 22163 - protein, 59 aa, Artificial Sequence
  Synthetic
KDAEELLKRVRDLLKRSLESLEKILRDSKELADRWRKKLEDLLRESEELVDRAEKILRR

SEQ ID NO: 22164 - protein, 55 aa, Artificial Sequence
  Synthetic
ERVREELKKLLTRVEEEHRKVLETDKKLLKELHKESKEVNDRDRELLERLEESVR

SEQ ID NO: 22165 - protein, 59 aa, Artificial Sequence
  Synthetic
KDAERLLRELKKLLEESLKSLKELTDRIRDEVRRVKKRLRDLLRESEELVKRAEDILRR

SEQ ID NO: 22166 - protein, 55 aa, Artificial Sequence
  Synthetic
EEVEETAKKLLDEVRRAHEEVLKEIRELLRDLERTVREVNEEDKKLLRKLEEDVR

SEQ ID NO: 22167 - protein, 56 aa, Artificial Sequence
  Synthetic
SEAEKVRKDLKDIADDLHRVSERVLREDERLLKRLHDVSRDVRERDREIVEDLRRG

SEQ ID NO: 22168 - protein, 55 aa, Artificial Sequence
  Synthetic
EEVLDRARKEVDEIKKKHKKVLDESRKLVAEAERKHEEILKESEDLAREIKERER

SEQ ID NO: 22169 - protein, 56 aa, Artificial Sequence
  Synthetic
SRAEKVREDLDRIEEDLRRVHREVLKEVERILKELHDTSKRVRDEVEKIVRDLRRA

SEQ ID NO: 22170 - protein, 55 aa, Artificial Sequence
  Synthetic
EKVLEDARKLVRESKENIRRVLEDLKRIVKKLKEDHKRILDELKKLVDKIKEDAR

SEQ ID NO: 22171 - protein, 56 aa, Artificial Sequence
  Synthetic
SRAERVREEIDKILEDLHRVSERIKRELTKLMEDLERTHERIKKAIREILADLRRR

SEQ ID NO: 22172 - protein, 55 aa, Artificial Sequence
  Synthetic
EEVLKEAKKLVDDLKEKHKEVLTRVERLVEESKKNLKRVLDELRDLVRRVKEEAK

SEQ ID NO: 22173 - protein, 56 aa, Artificial Sequence
  Synthetic
SEAERVREELDKIVEDLHRTSEDVKRRDEELLKDLERRHKEVKEEDEKILKDLRDS

SEQ ID NO: 22174 - protein, 55 aa, Artificial Sequence
  Synthetic
ERVLEELRKTVTEMKKRHRDILRESEELARESKENVDRVLEESRRRAEEIKRRAK

SEQ ID NO: 22175 - protein, 56 aa, Artificial Sequence
  Synthetic
DERERVKEELDKLLRDLERVHDKVREDDKRLLDDLRRVHEKARRDDKRILDELKRA

SEQ ID NO: 22176 - protein, 55 aa, Artificial Sequence
  Synthetic
EEVLERAKELVKRSKENVERVLRDSERLAKESKENVRRVLEESKRRVEEIEERAR

SEQ ID NO: 22177 - protein, 56 aa, Artificial Sequence
  Synthetic
SEAERVREELKRILEDLERVHREVEEAIERIVEELEDVHRRARERVERILRELERR

SEQ ID NO: 22178 - protein, 55 aa, Artificial Sequence
  Synthetic
EEVLKEIEKMVKESRDTVRRILEELRELVERSKRNVEKVLRDLERAVEKIERDAK

SEQ ID NO: 22179 - protein, 56 aa, Artificial Sequence
  Synthetic
KEAEDARRRVDEILEELRKLHDEVRKTDKELLDDLEREHERVKREDDKILDTLRRQ

SEQ ID NO: 22180 - protein, 55 aa, Artificial Sequence
  Synthetic
EKVLEDLERLVETSRKTVRDILEESKELVKRSKENVRRVLERSKELVKRVSERAK

SEQ ID NO: 22181 - protein, 60 aa, Artificial Sequence
  Synthetic
SDVDEARKTVKKILDESEETLERVRRELERILRDSERTLKRVEERVRRILRDLERELRKL

SEQ ID NO: 22182 - protein, 59 aa, Artificial Sequence
  Synthetic
REEIDKVLKEIRERVERSKKHLEDVLDRLRKIIEESKRHVEKVLEKLEKIVKELKDELK

SEQ ID NO: 22183 - protein, 60 aa, Artificial Sequence
  Synthetic
KDIEEVEKRVREILEDSRRMSKKDEESTRRILEESRRVSEEDKKSTEEILKELKDELRKL

SEQ ID NO: 22184 - protein, 59 aa, Artificial Sequence
  Synthetic
RDTIKKMLEEIKRRVDESKRHLRESNKRIRDIAEESKKHLEDSNKKVRDRADELKKRLK

SEQ ID NO: 22185 - protein, 60 aa, Artificial Sequence
  Synthetic
SDLERVKKAVEDILRDSERTLRRARERLKRLLEELRRTSEEDKKSTDEILERLKRELEKL

SEQ ID NO: 22186 - protein, 59 aa, Artificial Sequence
  Synthetic
RDELRKLLEEIRRRAEESKRHIEEVLKRLEEIVKRLKEELKRSNDEIREIVRRLEEELK

SEQ ID NO: 22187 - protein, 57 aa, Artificial Sequence
  Synthetic
STLEEMEKEVEKLNRDSRRTLREVAERVEELNRDNERTSKRVEDAVRELNKRLRDEV

SEQ ID NO: 22188 - protein, 59 aa, Artificial Sequence
  Synthetic
EEELRKVLKENEELARELKKELERALEENRRLHEENKEDLRRVLEENERLHRKLRKDAK

SEQ ID NO: 22189 - protein, 57 aa, Artificial Sequence
  Synthetic
DTLERVAEAIRRLNEDLKRTLEKVERAVREILKRLAETLKRAEEEVRRLNRDLERKV

SEQ ID NO: 22190 - protein, 59 aa, Artificial Sequence
  Synthetic
EEEIKKVLDDNKKLAEDLKRELKRVLEEIRKLVKELEDIVREVLKTNKELHERLKRRAD

SEQ ID NO: 22191 - protein, 57 aa, Artificial Sequence
  Synthetic
DTLERAAEEVKKLNEDNKRTSKRVEDEVRRLNRENEEMSKRVKDTVKKILDDLRRKV

SEQ ID NO: 22192 - protein, 59 aa, Artificial Sequence
  Synthetic
EKEIERVLRELERIARENKKELEKVLRENRELHERNKKLLEKVLRDIKRLAKTLRDRTR

SEQ ID NO: 22193 - protein, 57 aa, Artificial Sequence
  Synthetic
RELEEARERVKRLNEENKEFSRRVAEEVKKLNEENERTSKKVEDEVRKLNEDLRKKV

SEQ ID NO: 22194 - protein, 59 aa, Artificial Sequence
  Synthetic
EETIKRVLEELTRIMDRNRKDLRRVLEENKKLHDENRKELKRVLDENRRLHEEVKKRAK

SEQ ID NO: 22195 - protein, 57 aa, Artificial Sequence
  Synthetic
SELERVKTEVEKLNRRNREATERVKEEVKKLDEENKKSSKRVEDEVRKILDELRKKV

SEQ ID NO: 22196 - protein, 59 aa, Artificial Sequence
  Synthetic
REELERMLKRLKEIIERNEERLKEVLDRIRELIERNKELLRRVLKRIRDLVKELKERAD

SEQ ID NO: 22197 - protein, 57 aa, Artificial Sequence
  Synthetic
RELEEVERRVRELNEDNRRKTEEVKREVKRIDDDNRRASERAAREVKKLNKDLKDKV

SEQ ID NO: 22198 - protein, 59 aa, Artificial Sequence
  Synthetic
EKTLEDMLRRLKEIIKRNKDELEKVLRDIKKLVDDNKRDLERVLRRNEELHRELLERAR

SEQ ID NO: 22199 - protein, 57 aa, Artificial Sequence
  Synthetic
DELERAKEEIERLNDELKKSLEEVEKEVEKLDDDNRRTSRRVSEEVKRLNKELEDEV

SEQ ID NO: 22200 - protein, 59 aa, Artificial Sequence
  Synthetic
RDTIRKVLKENEDLIRKLEEILKKVLDEIRRLIEDNKRELEDMLRKNKELHDRLRERAR

SEQ ID NO: 22201 - protein, 57 aa, Artificial Sequence
  Synthetic
SELEEVKKEVEKLDERNKRLSKRVEEEVRKLNEENKRATERIKREVEKILEDLRRKV

SEQ ID NO: 22202 - protein, 59 aa, Artificial Sequence
  Synthetic
REELKRMLDRLRRIIEENERKLKEVLDRLRDIIRKNKEDLKRALERIKKLVEDLKRRAT

SEQ ID NO: 22203 - protein, 59 aa, Artificial Sequence
  Synthetic
SDLERVLDEIRRLAKEVKDTLRRMLEKNEELSKRDEDKTREMLKEIERLVKELEEIADK

SEQ ID NO: 22204 - protein, 59 aa, Artificial Sequence
  Synthetic
DDRLRKAEEEIKEIERDLKRTLDEVAKEVKRTIDRNRETSKRAAREVEKLLEKLREKTR

SEQ ID NO: 22205 - protein, 59 aa, Artificial Sequence
  Synthetic
SDLERMLREIRKLVEDDKRRTREMLRDNERLSREDKKKTDDVLRRLEELVRRLEEILKK

SEQ ID NO: 22206 - protein, 59 aa, Artificial Sequence
  Synthetic
DKRLDDIRRAIEEIIRDLRRASKKASEDVERTIERNERTSEEAKRRIEELIERLRRTDK

SEQ ID NO: 22207 - protein, 59 aa, Artificial Sequence
  Synthetic
SDLEEALKRVEKLVRDDKEKTKRMLERNRELVKRNKEKNKRMLDEIRRLVEELEDILRR

SEQ ID NO: 22208 - protein, 59 aa, Artificial Sequence
  Synthetic
DKRLKEVEDAVREILKDLKRTSERAKEEIERTIRDNERVVRRLEEEARKILEDLERRDK

SEQ ID NO: 22209 - protein, 59 aa, Artificial Sequence
  Synthetic
SRIEELLKTVEKLVDEVKKALRKLLEENKDLARKSKESLERLLDEVRDLVRRLEEILDR

SEQ ID NO: 22210 - protein, 59 aa, Artificial Sequence
  Synthetic
KDKLERVMRTLDEILKDLERTVERVKRALDESNRDLRREHERIKKELDKILDRLREKAR

SEQ ID NO: 22211 - protein, 56 aa, Artificial Sequence
  Synthetic
SEVERLKEELDKLHKENREVLEDSKRSLDKILDDVRKLAEDVKKRLDDILKELRDR

SEQ ID NO: 22212 - protein, 59 aa, Artificial Sequence
  Synthetic
RDLLRRLLREAERVSEETKKESKKLNDEIRKVLERLRDELRKIEDEIRKVVRRIRERAN

SEQ ID NO: 22213 - protein, 56 aa, Artificial Sequence
  Synthetic
DEVETLKKRLDKLHEDNKRDLERSKRSLEELLKELEEVVRRSEKTLDELLKKVEDQ

SEQ ID NO: 22214 - protein, 59 aa, Artificial Sequence
  Synthetic
RKLLKELEDTIRKVSDDTRRKSEELNEELKTVAEEIKKRSRELNEEAKDVLEKVERRTT

SEQ ID NO: 22215 - protein, 57 aa, Artificial Sequence
  Synthetic
DEVERAKEKLDKILEDLRDVVRRSKENLDRLHEENRETLERSKKNLDRLLEKVKKDG

SEQ ID NO: 22216 - protein, 59 aa, Artificial Sequence
  Synthetic
RRDIERILRELEKVLKKLTDESERLNREVERVSRDTKKKSKELNEELKRVLDEVKRKAD

SEQ ID NO: 22217 - protein, 60 aa, Artificial Sequence
  Synthetic
DEVREVLRELKKVVDDSKRDLDRVLREAERVVKESKDDIKRLLEETERVARDVERKIREN

SEQ ID NO: 22218 - protein, 55 aa, Artificial Sequence
  Synthetic
ETLDKEVKRLLKESKRAADELRERIKRLIEESKRLLDTVRREDKKILEKIERDLK

SEQ ID NO: 22219 - protein, 57 aa, Artificial Sequence
  Synthetic
DEIEKILEDLRRISEDTKRKHEEILRELEEILRELEERHRRILREVEEVARRLEERL

SEQ ID NO: 22220 - protein, 59 aa, Artificial Sequence
  Synthetic
EEKVKEVEREIRRLLKENEDASREVERLIEELKRRLDKISEDVERVLKKILERIDRATK

SEQ ID NO: 22221 - protein, 56 aa, Artificial Sequence
  Synthetic
RSVEEAEKVLEELKRRNERLNEEHRREVEKVREKNERLNKRHREDVERIKRELDKE

SEQ ID NO: 22222 - protein, 59 aa, Artificial Sequence
  Synthetic
DETIKDVLRKIKKISDETRKTLEDTLRELREISEKTRRRLDESLKELEEILRRLKEETR

SEQ ID NO: 22223 - protein, 60 aa, Artificial Sequence
  Synthetic
REAEEIRKEVEKLLRDLKRALDEHRETSRRLVEELKDILRKNREEVERLVREIREVIKRV

SEQ ID NO: 22224 - protein, 55 aa, Artificial Sequence
  Synthetic
RELIEEITRIVEKAKKELREVSKRLREIVKKIKEDNDRSNKRLREIAKEIKDRLT

SEQ ID NO: 22225 - protein, 60 aa, Artificial Sequence
  Synthetic
SEREEARERVKDLSRKLKEINERSEKHLRDLAKENRDANRRTREEVERLLDKIRKVIKDV

SEQ ID NO: 22226 - protein, 55 aa, Artificial Sequence
  Synthetic
EELIRELEKIVRDAEKKNRDVNREVRKILEDSKRELEKVLRDLERKVREIEKELK

SEQ ID NO: 22227 - protein, 61 aa, Artificial Sequence
  Synthetic
RELEEVLKKLKEDAERLKRILEEATRELEKILERLHRLNEKSTEELRRIVKDLKEELKRRG

SEQ ID NO: 22228 - protein, 55 aa, Artificial Sequence
  Synthetic
EEVEKTVRKLEEDLKRAIEKHEEDSRRLVKRLKESNDEHEKESRRLVRELEKEIE

SEQ ID NO: 22229 - protein, 59 aa, Artificial Sequence
  Synthetic
DEVREVIKTVRKLLEDLHRTNREVIERVKRTSEETHRKNEDMLRRLRKLVEDLKETLDR

SEQ ID NO: 22230 - protein, 59 aa, Artificial Sequence
  Synthetic
EKSLRDAEREVKKLLEELKRSLDKLREDVERLLRENKESLDRLREEVKKIERELREKTR

SEQ ID NO: 22231 - protein, 59 aa, Artificial Sequence
  Synthetic
SDVDRVLEELRKLVEELHRRNRKIIEDLRRASEKTHRKNRDLLEKAKKLADELREIAER

SEQ ID NO: 22232 - protein, 59 aa, Artificial Sequence
  Synthetic
KDELRRLEEAAKKILDDLEDSLRKLEEAVKDLKRKNKKSLDDLAEAAKDILRRLAETAR

SEQ ID NO: 22233 - protein, 59 aa, Artificial Sequence
  Synthetic
DEAEEVIKTVKRLLDELHRRNEEAIKEDRRLVEELHRTNEKVLREVEELVKRLAEILRR

SEQ ID NO: 22234 - protein, 59 aa, Artificial Sequence
  Synthetic
KETLDRLRERAEELKRRLEKSLRDLNRDNERTKRELRESLRKLEETARRLKEEIDRRTK

SEQ ID NO: 22235 - protein, 60 aa, Artificial Sequence
  Synthetic
DEADDLIRRVRELVKRVKEALEDLLRRNKDVLRKVKEELEKITRRNRDKVRRVEEELKRI

SEQ ID NO: 22236 - protein, 59 aa, Artificial Sequence
  Synthetic
SRKLEELRKEVEKLKEELDRVLEEARKEVEKSNRELKEVLERHAEDNERIKRRLDEARR

SEQ ID NO: 22237 - protein, 60 aa, Artificial Sequence
  Synthetic
SELERLLDEVDRIVREIEERLRDILRKNRELSEDSERKLRELLREVRDLVRRIMDELRRT

SEQ ID NO: 22238 - protein, 59 aa, Artificial Sequence
  Synthetic
REKLEEARRRIDEIRRRLEELLKRAREDSDRSNKRNKDLLREIEEELKKLKRELDEETR

SEQ ID NO: 22239 - protein, 60 aa, Artificial Sequence
  Synthetic
SLKEKVKKVIEDLKRAIDDLLRKVREESKKSNDHIRKLLEDSERTLRDLARRIKKLKDDG

SEQ ID NO: 22240 - protein, 59 aa, Artificial Sequence
  Synthetic
ARLIKEVIEEAERLLREIAKRIRKVIEEDRDLNRRIAKKLDELNRRAEELLKRIADRAK

SEQ ID NO: 22241 - protein, 59 aa, Artificial Sequence
  Synthetic
SSKETVKDVLRKITKRIRDLVRESKKTSDESNKHIKELLERSKKTIDELERRIEDLRRR

SEQ ID NO: 22242 - protein, 59 aa, Artificial Sequence
  Synthetic
EELLRRLIKELEDLMREIERKLRELNERDKRLNEEIAKKLEKLNRDARKLVEEIERRAR

SEQ ID NO: 22243 - protein, 59 aa, Artificial Sequence
  Synthetic
KLREDLEEMLRRSEKHIRDLVKRSEETSRDSNRHIEKLLKDSRKTIEDLKRKIEDLARK

SEQ ID NO: 22244 - protein, 59 aa, Artificial Sequence
  Synthetic
RELLERLIRELKRLNEEIAKKLEDLNREDRRLNEEIAKRLRDLNEELKKLVEDIERRAR

SEQ ID NO: 22245 - protein, 60 aa, Artificial Sequence
  Synthetic
RSKEEVDKMLERLRERIEKLVEESRKTSKESNEHLEKLFRESEETIKELKKRIEDLRRKG

SEQ ID NO: 22246 - protein, 59 aa, Artificial Sequence
  Synthetic
EDLLEKLIRELEELIRRIEKKLRDLNREDRELNKRIADEIERLNREARRLIEEIRKRAE

SEQ ID NO: 22247 - protein, 59 aa, Artificial Sequence
  Synthetic
SLEEEVRREIERSRRHIEKLVRDSERTSKESNKHIKKLLDESKRTLDEIRKRIEDLARK

SEQ ID NO: 22248 - protein, 59 aa, Artificial Sequence
  Synthetic
REVLKELIRELRRLNEEIRKKLEKLNDEDRRLNEEIRRKLEEINEELRRLVREIEERAR

SEQ ID NO: 22249 - protein, 60 aa, Artificial Sequence
  Synthetic
SLEETVEEVLRRLRRKIEKLVTESEETIRRSKKHIEEVLEKSKRTLDKIKEDIDRLRKEG

SEQ ID NO: 22250 - protein, 59 aa, Artificial Sequence
  Synthetic
REVLKELIDRARELIERIARKLTELNKENRKLNEEIARRVEELNKELKRLLKEIEDRAR

SEQ ID NO: 22251 - protein, 60 aa, Artificial Sequence
  Synthetic
STKETVARELERSRKHLEDSFREAERAIKESEEHIRELLERSRRTLKEIEDRIRDLRRRG

SEQ ID NO: 22252 - protein, 59 aa, Artificial Sequence
  Synthetic
ERLLRELIEELRRLNRKIHEDNRRLIEDNKRLNEEIKRELDKLNRELERETEEIKKRAD

SEQ ID NO: 22253 - protein, 57 aa, Artificial Sequence
  Synthetic
SVRETLREVLKESKKHLDDLVRRVKEEIERSKKHIDDLIRRNKESLDDIRRTVEEKI

SEQ ID NO: 22254 - protein, 59 aa, Artificial Sequence
  Synthetic
SDLVRELIKRLKEINDRVAERIKDIIRKVREANKDLERKLRELNKRSRDVLEEVVRAEE

SEQ ID NO: 22255 - protein, 57 aa, Artificial Sequence
  Synthetic
SAAEEAEKASKDSEKHIKDLIRRLREVSEESRRHLRRLIEENKRSLEEIEKEVRKKV

SEQ ID NO: 22256 - protein, 59 aa, Artificial Sequence
  Synthetic
TELIKRIIDRNREINRRVAEAIKKIIKDNRDINEDLERKLRKLNEESKRVLDDVVRREK

SEQ ID NO: 22257 - protein, 57 aa, Artificial Sequence
  Synthetic
SVEERLKDELRKSEEHLRRLIRELEKALEDSKRHADRLIKENRDSLRRIEDKARKKI

SEQ ID NO: 22258 - protein, 59 aa, Artificial Sequence
  Synthetic
DETVKRIIEENRRINEDLARKIKEIIRDNKRFNEEVEEKLKRLNDTSEEILRRLVRRDE

SEQ ID NO: 22259 - protein, 57 aa, Artificial Sequence
  Synthetic
SVDKELEEVIRRSKDHLEKLIKEAEDALKRSEEHLRKLIEEVKRRLEEVEKRVREKV

SEQ ID NO: 22260 - protein, 59 aa, Artificial Sequence
  Synthetic
SELIKRLIKENKEINEKLAREIEEIIKENKRINDELKKRLEELIERLERILEEVERRER

SEQ ID NO: 22261 - protein, 57 aa, Artificial Sequence
  Synthetic
SVDRTLEEVIKDSRRHVKELIDRLEKVIKESEENVKRTVDDNERSLKEIADTVRREI

SEQ ID NO: 22262 - protein, 59 aa, Artificial Sequence
  Synthetic
SEDIKRLIDTNRKINRDVAETIKEIIKEVRKINKEIDDKARELNKESRRVLEEVVRAER

SEQ ID NO: 22263 - protein, 57 aa, Artificial Sequence
  Synthetic
SVAETLRKVLKESEENVKRTVDRAEEELKKSEEHLRRLVERLKEVLEDVRRRVEEEV

SEQ ID NO: 22264 - protein, 59 aa, Artificial Sequence
  Synthetic
DERVERIIRELREVNERLDREVERLIRENREINRRLAEEIKDLIRRLREILREVVERAK

SEQ ID NO: 22265 - protein, 57 aa, Artificial Sequence
  Synthetic
SIAEKVEKVLKESKENLDETIRRAEEDLKRSRDHLRKLIEENKRSLDRIKEEVDRRI

SEQ ID NO: 22266 - protein, 59 aa, Artificial Sequence
  Synthetic
SDAIEKLITDLRKINEEADRKVKEIIKRNRDINKKVEDDLRELNKESTTVLREVVERER

SEQ ID NO: 22267 - protein, 60 aa, Artificial Sequence
  Synthetic
SELEKIIEDARRVLEEDERRNREVNRKLRKILEDNERLNREVNKRLREILKRLKEELKRL

SEQ ID NO: 22268 - protein, 55 aa, Artificial Sequence
  Synthetic
EEAKRALDKIREDVRKILEDTKRELEDVRRRVEEILRETREELKRVEDDVKRAED

SEQ ID NO: 22269 - protein, 60 aa, Artificial Sequence
  Synthetic
SELEDIIRKLDEILKRNEEENRRVIRRLRELLEEDERRNRKAIEDLERIITKLKDDVRKL

SEQ ID NO: 22270 - protein, 55 aa, Artificial Sequence
  Synthetic
RDAERRIREVEEEVKRILEETEEVLRDVKRRVDEILKTTEDRIREIEEEIKRTVK

SEQ ID NO: 22271 - protein, 60 aa, Artificial Sequence
  Synthetic
DELRDIIRELRDILRENKKRNEDAIRKLRKILKENEKKNRDAIRELEDILEKLRKEIEDL

SEQ ID NO: 22272 - protein, 55 aa, Artificial Sequence
  Synthetic
RKVEEDIKRVEEEVKKILDKTDEELKEVERRVRKILRETEEELKRVEDEVRRAKT

SEQ ID NO: 22273 - protein, 60 aa, Artificial Sequence
  Synthetic
REEEKARRVMEKLKRDVDRINTRHRDILKKIEDEVRRIDEEHKTEVKKIKDRAEEIIRRI

SEQ ID NO: 22274 - protein, 55 aa, Artificial Sequence
  Synthetic
KDLIREVEKILKDIEDLVRESERELREILKDIKRMVDESLKRLEDILRELEERTR

SEQ ID NO: 22275 - protein, 60 aa, Artificial Sequence
  Synthetic
REEEEMRKVVKDLEDAARELDRDHETKLRRIEEEVKKLNEEHKRELERIARRIKEIIDRI

SEQ ID NO: 22276 - protein, 55 aa, Artificial Sequence
  Synthetic
KDLIRRLEEILRRIARELEDSLRKLEKILEEIKEIVKKSLDELRRIVDELEKRVR

SEQ ID NO: 22277 - protein, 60 aa, Artificial Sequence
  Synthetic
SEEEEVRRVLKRIAEEVKRLDEDHRRILEEIRKKVEKSSRDHKRELDKIKRDADEIIRRI

SEQ ID NO: 22278 - protein, 55 aa, Artificial Sequence
  Synthetic
KDLIKKLEEILEEIRRLLEESLRELEDILKKVHDRNARTLERLREILKEIEDRAR

SEQ ID NO: 22279 - protein, 60 aa, Artificial Sequence
  Synthetic
DEKRKVDKRLKEIEETIRRLLEEHRRELDEIRKRIEEISRRHRKELEDIEREVRKIISRI

SEQ ID NO: 22280 - protein, 55 aa, Artificial Sequence
  Synthetic
EDLIRDVERVMREVKRDLERSLEELRDVVRRAEEEVRATLRKLREILKKVEDETR

SEQ ID NO: 22281 - protein, 60 aa, Artificial Sequence
  Synthetic
SEEETMRKVVKEIREKVRRISERHKEELERITDALRRSSKRHEDELREIEKAVREIIRRI

SEQ ID NO: 22282 - protein, 55 aa, Artificial Sequence
  Synthetic
DKLIRELEEILERLEREVRKSLDRLRKILEDIHRTNKDTLDRLREILKKVEDRTR

SEQ ID NO: 22283 - protein, 59 aa, Artificial Sequence
  Synthetic
SEVEEVIRRLEELVDRLHKINKRAIEENERLNRELHEKNRDIIRKLKELVERLRDIKEK

SEQ ID NO: 22284 - protein, 59 aa, Artificial Sequence
  Synthetic
KETADRARDEVRRIEKELDDSLRELEKRVRDSKRHLDRSLEELEKVVDEIRKELEDLAK

SEQ ID NO: 22285 - protein, 59 aa, Artificial Sequence
  Synthetic
KEVEEVIKRLRELVDRLEKENRDVNEDNKRLNEELHDRNRKMIEELRRLVTELEDIRRK

SEQ ID NO: 22286 - protein, 59 aa, Artificial Sequence
  Synthetic
KDLLKRVEDEARKIEEKLKRIHEETKKVADDSERHLRKSLRELEKVAREIKKRLEEERK

SEQ ID NO: 22287 - protein, 59 aa, Artificial Sequence
  Synthetic
DEVREIIKDLRRLLKELEERNREINDRNKKLNDTLRKELEDIKRRLEKLLRELEKIVRE

SEQ ID NO: 22288 - protein, 59 aa, Artificial Sequence
  Synthetic
EEVLRRVEEEVRDIERRLDKIHEDTRDTAEKSERHLDALLRDLERVAREIEEALDRLKD

SEQ ID NO: 22289 - protein, 59 aa, Artificial Sequence
  Synthetic
SEVEEVIRRLRELLRTLEEENRKMIRENERLLEELKKRNEDIERELRKLVTELAKIADK

SEQ ID NO: 22290 - protein, 59 aa, Artificial Sequence
  Synthetic
EKLARELREVAERIKKRLDEIDETTRRMVTESIKRLEEIDKRTTERAREIKKELRDRAT

SEQ ID NO: 22291 - protein, 59 aa, Artificial Sequence
  Synthetic
SEVEDLIRRLEELLDRIRRDNERIIKELEELLRELEETNKRLIERIRKLLEDLRDTVRK

SEQ ID NO: 22292 - protein, 59 aa, Artificial Sequence
  Synthetic
EKLMREAKEAVDRIKKRLDEINKRTEDVARRIRKRLDEIDERTKEEAKRIKEELDKEEK

SEQ ID NO: 22293 - protein, 59 aa, Artificial Sequence
  Synthetic
SEVEELIERLKELLERLEELNRRVNEENRRLNEELERRIRKAIEDLKDLLRRLDDIRRR

SEQ ID NO: 22294 - protein, 59 aa, Artificial Sequence
  Synthetic
EKKLRELKEVVDRLKKEIKRIDEETRKEAERSKRNLEKILRDLEREAKRLKEEIDKKAR

SEQ ID NO: 22295 - protein, 59 aa, Artificial Sequence
  Synthetic
DEIRDLLRRLRELNKRIADRIRKLNEENKKLNKEVADKIRKLNREAREIIKTIAEIIKS

SEQ ID NO: 22296 - protein, 59 aa, Artificial Sequence
  Synthetic
KEVLDRAKEEVDRSRKHLKELLDRSRETSDRSRRHLKDLMRRSRETIRKLDEELKRLEK

SEQ ID NO: 22297 - protein, 59 aa, Artificial Sequence
  Synthetic
SEIEKLIREAERIIEEIAKEIKDLNEENERLNREVDKRLTDLNRRAKELLEEVKRIIDR

SEQ ID NO: 22298 - protein, 59 aa, Artificial Sequence
  Synthetic
EEKLRDARREIERLRRELEKLLEDSRRTSEESRRNLERSLDESRKTIEELIKRLDDAER

SEQ ID NO: 22299 - protein, 59 aa, Artificial Sequence
  Synthetic
SEIEKLIEDAKRILEEVARRLKKINEDNDRLVRKIADELRRLIEEAKKILDEIKKIIED

SEQ ID NO: 22300 - protein, 59 aa, Artificial Sequence
  Synthetic
EDVLREVRKVIKKLRDELEELARRSRKTSEDSRKRLDDLLKRAREVIEELKKRLEDLRR

SEQ ID NO: 22301 - protein, 59 aa, Artificial Sequence
  Synthetic
KDIEKLIKDLEKLNRDIAKRIRDLNETNKKLVRDVAEEIKRLNEELKKLLEDIRRIIER

SEQ ID NO: 22302 - protein, 59 aa, Artificial Sequence
  Synthetic
EEVLKRAREMVKRSKEHLDELLKRSEDTSRESKRRLEKLLKESEDTIRRLEEELKKAEK

SEQ ID NO: 22303 - protein, 59 aa, Artificial Sequence
  Synthetic
KEIEELLEEIERILREIKKDLERINKENEKLNREVKKKIEDLIREVRKIIEEIRRIIER

SEQ ID NO: 22304 - protein, 59 aa, Artificial Sequence
  Synthetic
ERKLKEVRDTIEELKKRLEKLAKESRDTSRRSRENLERLAREFREEIKRLKKELEEART

SEQ ID NO: 22305 - protein, 59 aa, Artificial Sequence
  Synthetic
SEIEKLIRDAEKILEEIAELIKRLNEENKELNERVAKRIKDLNEELRRLLKEIADIIRR

SEQ ID NO: 22306 - protein, 59 aa, Artificial Sequence
  Synthetic
REELEKVRKVIDKLREELKRLERESERTSEESRRNLERLLRESRKTVEEIKKRLDELRK

SEQ ID NO: 22307 - protein, 59 aa, Artificial Sequence
  Synthetic
SDIERLIAELEKLNKEIEDKIRELNRENRRLNKEIDEEIERLIEEARKIIEDIREIIRR

SEQ ID NO: 22308 - protein, 59 aa, Artificial Sequence
  Synthetic
RKKVEEARKKIEDSKRHLEELLRDSRRTVKESNDNLRRSAEKARREIKRLEEALKELRR

SEQ ID NO: 22309 - protein, 60 aa, Artificial Sequence
  Synthetic
DEVEKVVRELEEVLRRNKELLEKTKKETKEALDRNRELLEDTKRKTREILERLKKVIKEG

SEQ ID NO: 22310 - protein, 59 aa, Artificial Sequence
  Synthetic
EEVVKRLRDILRRVKEAAEELHRDDERELRRVEKELEELHKDDRRVVEEVKDDVRKAEK

SEQ ID NO: 22311 - protein, 60 aa, Artificial Sequence
  Synthetic
SDAERVVRELRKILKEIEDTIRKSKKETKEMLDRNRELARKVKEELKEILRRLEKMKRDG

SEQ ID NO: 22312 - protein, 59 aa, Artificial Sequence
  Synthetic
ERLLRELRRIVEEVKRAVEELNRDDRRTLERVKREAKKIHEDLRRVVEKLERDVEEARR

SEQ ID NO: 22313 - protein, 60 aa, Artificial Sequence
  Synthetic
DEVEKLKRELDKILEDLERLHRRLEEELRRIHEENRDLSRRTKEELDRILKRIEELLRER

SEQ ID NO: 22314 - protein, 59 aa, Artificial Sequence
  Synthetic
EKVLEELRRILRRVEEAVRRLNERSEEVLRDVERRDEELNEDNKRRLEEVKKRVEDLLR

SEQ ID NO: 22315 - protein, 60 aa, Artificial Sequence
  Synthetic
SELDELKKSLEEIHRRDREKNRKLKEDLKRILDEIRKRLEESKKRLEEILREIERLLRER

SEQ ID NO: 22316 - protein, 59 aa, Artificial Sequence
  Synthetic
EKALKELRKILEDVARANEELNRDTRRTLERVEEEVEKLNRDHKRVLEKVERDVRRLTK

SEQ ID NO: 22317 - protein, 60 aa, Artificial Sequence
  Synthetic
SEVERLKEELKRILEEIKKLVDDSKKDLERIHREDKKKNEDLKKRAEEILREIRDLLTKR

SEQ ID NO: 22318 - protein, 59 aa, Artificial Sequence
  Synthetic
EKLLRDLRRVLEEVKRAVDEISKDHKRMLDAVKKANEELNDDSRRVLERVDREVKKAEK

SEQ ID NO: 22319 - protein, 61 aa, Artificial Sequence
  Synthetic
SELDRVREEAKRIDDENRKRSEDSVRDSERLLREIEELHRETKERSEELLKRVEEIVRDRG

SEQ ID NO: 22320 - protein, 59 aa, Artificial Sequence
  Synthetic
DRLLEELEKVLRESARRNERIITENRRTMKRVSEEVEKLNRDDKRRMEELEKRAREIIT

SEQ ID NO: 22321 - protein, 61 aa, Artificial Sequence
  Synthetic
SELERAVEELEKLLKELEDLHRKSKEDSKDMLRRVEELHRRTKEKSKRILEEIERRITEEG

SEQ ID NO: 22322 - protein, 59 aa, Artificial Sequence
  Synthetic
DELMRKLEEILKRVAEAIKRLIDDDRRVLKRVAEEVKKLNEDDKRVADEVSERIKERLT

SEQ ID NO: 22323 - protein, 61 aa, Artificial Sequence
  Synthetic
DELEEAEERLREIDKRNEDLHEESRKESKRLLDELRKLVEDVKRELEKILEEAKDIVRKRG

SEQ ID NO: 22324 - protein, 59 aa, Artificial Sequence
  Synthetic
KEKLEKLRDVLRESERRNRELIEEDKEVMRRVSEEVKKLIDDLRRALEKAARDVEKIRR

SEQ ID NO: 22325 - protein, 61 aa, Artificial Sequence
  Synthetic
SELEDAERRAEEIDRRNKRTVERVEEELEKILREVEELHRRTEEKSKRILDEIRRKIRDRG

SEQ ID NO: 22326 - protein, 59 aa, Artificial Sequence
  Synthetic
KELADKLRDVLRRSAEENKKIIDRLRKILEDVARAVEELIKRDKRVMEEVKKEIDKLLT

SEQ ID NO: 22327 - protein, 58 aa, Artificial Sequence
  Synthetic
SEVEEIKKRARKLLEEVREIVDRVKKLHERLLREIEKTNREAKREHKRVLDTIRDIFR

SEQ ID NO: 22328 - protein, 58 aa, Artificial Sequence
  Synthetic
ETVADLDREIRRLKDELRRILEDLRRVSEEVKKELEKLTRDTRRVSKEVKDELKKVEK

SEQ ID NO: 22329 - protein, 60 aa, Artificial Sequence
  Synthetic
REVDEIKKRLTEMLETVRKIVEEIRRELEKLLEDVREINERVKEEHERILKDIRDVARKI

SEQ ID NO: 22330 - protein, 58 aa, Artificial Sequence
  Synthetic
ETMEDLKRRVREVEKRLEEILRRLDDVVRKIKEELKKLTDDTRRVSKRVKDDLERTRT

SEQ ID NO: 22331 - protein, 58 aa, Artificial Sequence
  Synthetic
SRVEEIKKELRRLLEEVRKKNEESKERDRRLNDTIRRELEEIIRRLRKLLEEIRRLRE

SEQ ID NO: 22332 - protein, 58 aa, Artificial Sequence
  Synthetic
RTVEDLRRVVEKVLRDIKRSIDDVRRENKKSNEDARRWLEELKREVKRLKDELREIEK

SEQ ID NO: 22333 - protein, 59 aa, Artificial Sequence
  Synthetic
SEVERIKRELERLLKEVKDANKRVKDTLRKLLRDVEEMNRRVKRENHELLRRLDELVKA

SEQ ID NO: 22334 - protein, 59 aa, Artificial Sequence
  Synthetic
EELLKDVRKVAKEVEEELKKLHDDTKRVADKVKEDLDRLHRDSERNARRSEEEMDKRRK

SEQ ID NO: 22335 - protein, 59 aa, Artificial Sequence
  Synthetic
DRVREVKERLKKLLEEVERTNREVMERNHRLLEDVERKNRRVKEENHRLLEELKRLRED

SEQ ID NO: 22336 - protein, 59 aa, Artificial Sequence
  Synthetic
ERLLEDVERTAERVERELDRLHEETKRNADRSREELEKLHRDSEKNARDSAKELEKIRR

SEQ ID NO: 22337 - protein, 59 aa, Artificial Sequence
  Synthetic
DEVERAEEELERLLRELKKLHEDAKERARELLKRIEDVNRKVKEELKRLLDTIRKLREA

SEQ ID NO: 22338 - protein, 59 aa, Artificial Sequence
  Synthetic
KDLLEKVKRVVEEVHKRSRELNEDTRRVIDKVEKDLDELHRDSRRVVETVKEELEKLRK

SEQ ID NO: 22339 - protein, 59 aa, Artificial Sequence
  Synthetic
KEVEEVKRRLREVLKRLKEMHERVKRELEKLLKKVEDFNRDVKRKNHDLLRRLEELKKA

SEQ ID NO: 22340 - protein, 59 aa, Artificial Sequence
  Synthetic
KDLLEDVEREARRLHDESRKLNEDTKRVVDTVTEELKKLHRDSERNAKRSEEEMDKRRK

SEQ ID NO: 22341 - protein, 59 aa, Artificial Sequence
  Synthetic
DEVERVKETLDKLLDDVRKLNEEVKKRLEELLEKVERDNRKVKEDNHRLLEEVKDLKRR

SEQ ID NO: 22342 - protein, 59 aa, Artificial Sequence
  Synthetic
KDLLEDVERRAKRVEEELDKLHEDTRREADRVRRDLRRLDEDTKRNVDESRKELEKTRK

SEQ ID NO: 22343 - protein, 60 aa, Artificial Sequence
  Synthetic
SEVEEVIRRIRALVEEIARKNEDILRKNRKLLEDLRELVERVIKEIKELIDRLADEVRRV

SEQ ID NO: 22344 - protein, 59 aa, Artificial Sequence
  Synthetic
DRVRKEVEEVLRDVEERIRRLDEEVRRRAEESERELERLREKVEDMIEKVKRALEELRR

SEQ ID NO: 22345 - protein, 60 aa, Artificial Sequence
  Synthetic
SELEEIIKKLRKLVEDVARRNEELIKKLEETNKRLEDEVRELIEEIKKLIDELAETVKRI

SEQ ID NO: 22346 - protein, 59 aa, Artificial Sequence
  Synthetic
EEMKKRLRDVAEKLKEDVRDLDRKVKKVAKESHERNRRILKELEEVAARVTERLEELRR

SEQ ID NO: 22347 - protein, 55 aa, Artificial Sequence
  Synthetic
DEDERVDEVIKKVREDLRKLLEDSERVVKRSKEELDRWRKKVEDVMRDSDRRLEE

SEQ ID NO: 22348 - protein, 55 aa, Artificial Sequence
  Synthetic
EEVIKELKKLIDKLREDSKKTIEENKKMNKDAADEIEKIIEDNRRLIKRIEEEDR

SEQ ID NO: 22349 - protein, 55 aa, Artificial Sequence
  Synthetic
SEDERVEEVVKRIEDKLRRLLEESKRVVDDSKRRLDEWRKEVEKVVKKSTDDLEK

SEQ ID NO: 22350 - protein, 55 aa, Artificial Sequence
  Synthetic
EEVIKELEELIERLARISKKTIEEDRRVNKELAERIKEIIERNRRVIEEARERLR

SEQ ID NO: 22351 - protein, 59 aa, Artificial Sequence
  Synthetic
KELEELIEELERLNREINERAKELIKKLRKLNEEVARRHERLIEELRRILEELKELLER

SEQ ID NO: 22352 - protein, 59 aa, Artificial Sequence
  Synthetic
EELRRRAKRVLEESKRNIEKVAEDVTRVLRESEESLERLRERSERVLREVEKTIRDMAR

SEQ ID NO: 22353 - protein, 59 aa, Artificial Sequence
  Synthetic
SEVERLIEELDELNRRINEKHKKLRRELEELNKRVAERHEELIRRLRKLLEDLERLARR

SEQ ID NO: 22354 - protein, 59 aa, Artificial Sequence
  Synthetic
EELRKRVEDALRRSKENIKRLEEESREVLRRSEKSIDELRRESERVLKEVKEEIERVRK

SEQ ID NO: 22355 - protein, 59 aa, Artificial Sequence
  Synthetic
SELEELIKELRDLNRRINKRVDDLADELRRLNERINRRHEELIKELRRLLEDLKRKFDR

SEQ ID NO: 22356 - protein, 59 aa, Artificial Sequence
  Synthetic
EELKKRADDVLRESKENIERVERKIRRVLEESEENIEDLRRRSKEVLDEVRKRIEDIRR

SEQ ID NO: 22357 - protein, 59 aa, Artificial Sequence
  Synthetic
SELEELIRRLKELNKDVNEKHKRLIEELEKLNRDINERHKELIEELERLLRRLEKLLRD

SEQ ID NO: 22358 - protein, 59 aa, Artificial Sequence
  Synthetic
EDLRREAERVLRESEENIKELEDRSRDALRRSEENIRRLKKESEDVLREARREVERLER

SEQ ID NO: 22359 - protein, 59 aa, Artificial Sequence
  Synthetic
SLEEELDKVLKESRDNVRRVEEELEEVMEKSERAAEKLRRDLDRVLEELEKMIRDLKRR

SEQ ID NO: 22360 - protein, 59 aa, Artificial Sequence
  Synthetic
REDIKRVIDTLRKLNERLNREVKEVIKRNEELVRRLAERVKKVVEDLRRLVKRLDDEVR

SEQ ID NO: 22361 - protein, 60 aa, Artificial Sequence
  Synthetic
SLEETLKEVLRKSEENAERLKRELEKVLRKLEEDLRRLDERLDEVLKRSRDEARKLREAD

SEQ ID NO: 22362 - protein, 59 aa, Artificial Sequence
  Synthetic
REVIKRVIEDLDRLNDELNKEVEEVIRRLEDIVRELEKKIREVIKRNKELVDRLEEKVR

SEQ ID NO: 22363 - protein, 59 aa, Artificial Sequence
  Synthetic
DLEKRLRDVLKESDENIEELRRELREVLKESEDNVKKLAEENKEVTDRLREEIKRLKEE

SEQ ID NO: 22364 - protein, 59 aa, Artificial Sequence
  Synthetic
KEEIERVIRELKDLNRRLNEELKRAIKRIKELNKRLNELSKRSIDELRRLVEELERRVK

SEQ ID NO: 22365 - protein, 61 aa, Artificial Sequence
  Synthetic
SLKEKLEEVLRRSEENVERLRKENEDVAKKNREAIEEIKKRLDDVLRELRERIERLKKEGV

SEQ ID NO: 22366 - protein, 59 aa, Artificial Sequence
  Synthetic
EEVIDRAVEELKKLNDDLNRTVKKVIRESEELTETLRKDVKRVVDDLRRLVEELARRVK

SEQ ID NO: 22367 - protein, 59 aa, Artificial Sequence
  Synthetic
DLEEELKEVLKESEENIERLKRENDRVVEKNKKAVDDLRERNKRVTERLREEIERLKRR

SEQ ID NO: 22368 - protein, 59 aa, Artificial Sequence
  Synthetic
KKDIKRVIDELRKLNEDLNRRVKEAIKTSEKITDDLRRMSEESEKELRELVRRLEERVR

SEQ ID NO: 22369 - protein, 60 aa, Artificial Sequence
  Synthetic
SEVEEIIRRIDELIKRLAETVKEIVDRLRKLNKKLNDENREIIKEIRDLIRELAKEVKRI

SEQ ID NO: 22370 - protein, 59 aa, Artificial Sequence
  Synthetic
EEVRERLERVLRRVEEVIKRLKEELKKVLDESRKNVEDVTRENEKVLDEVRKTIDELRR

SEQ ID NO: 22371 - protein, 60 aa, Artificial Sequence
  Synthetic
SEVEELIKTIERLIKELEKLNEEIIKRLRDLNKRLNERNEEIERTLRKLITDLARMVREV

SEQ ID NO: 22372 - protein, 59 aa, Artificial Sequence
  Synthetic
EEVLRRLEEVLDRVKKKIKTLTDKNREVLERSRENVKKVTEDNERVLRKLKEDIERLRK

SEQ ID NO: 22373 - protein, 60 aa, Artificial Sequence
  Synthetic
SELEEALKDIKRLIDKLRKDNEDIIRRLRETNDELRKLNKKIIDEIRDLIRRLEEVAKRI

SEQ ID NO: 22374 - protein, 59 aa, Artificial Sequence
  Synthetic
KDLKKRLEDVVKRVREEIEKLTRDNERVLEESRRTLEKLTRENEKVLREVKKKIDDLRK

SEQ ID NO: 22375 - protein, 60 aa, Artificial Sequence
  Synthetic
SELEDVEEKIKRLIDRLRELNKKIEDDLRKLAKELADLNKKIIREIEELIRRLAEVVKRI

SEQ ID NO: 22376 - protein, 59 aa, Artificial Sequence
  Synthetic
EELKRRLRKVLERVKREVEKSSERNREVVERLRKELERLTRENEEVLKRVKKEIERLEK

SEQ ID NO: 22377 - protein, 60 aa, Artificial Sequence
  Synthetic
SEVDEVIKRLDELIEELRKRNDDIIREIEKLIKRLEEENKEIVDRIRELIKRLEDMVRRL

SEQ ID NO: 22378 - protein, 59 aa, Artificial Sequence
  Synthetic
KDVLDRLREVLDRLRKEIERLTRKNEEVLKDVRRRVKRSSEENEKVLKEVRERIERLKK

SEQ ID NO: 22379 - protein, 60 aa, Artificial Sequence
  Synthetic
SDVDEVIKRLRELIRENHKRNKKIVDEIRELIRELKERNKKIVDEIRELIKRLKDIVRRL

SEQ ID NO: 22380 - protein, 59 aa, Artificial Sequence
  Synthetic
EEVLRRVEEVLRELREAIKRDDEENKKVLEEARKTVEDSSRENKRVLEEVRRRLDEERR

SEQ ID NO: 22381 - protein, 59 aa, Artificial Sequence
  Synthetic
SEKERAEEVFRESKKNIDDVKRKLERVLEDSKRTLDELRKEVEKVLKESEDELRKLARS

SEQ ID NO: 22382 - protein, 55 aa, Artificial Sequence
  Synthetic
EELIREIRELNKRLNDTIEDVIRRMKDLNRRLAEVIKEIIERNKKLIEDAARRIK

SEQ ID NO: 22383 - protein, 59 aa, Artificial Sequence
  Synthetic
REKERLKEVVEKSRRNLEKLREDSERVLEKSRRTLERLKKEVEEVLKESEERLRELARS

SEQ ID NO: 22384 - protein, 55 aa, Artificial Sequence
  Synthetic
EELIKTIEDINRRANEESKRTEKELEDINRKLEEDIKRIIDRNRKMIEDAARKIK

SEQ ID NO: 22385 - protein, 59 aa, Artificial Sequence
  Synthetic
REEERLEEVLRRAEEILKRLEDEVRKVVEDSKKNIEDVRREVEEVLKKSEDRLRKLARD

SEQ ID NO: 22386 - protein, 55 aa, Artificial Sequence
  Synthetic
EELEKRLKEILDRAAEEIRRIIRELEELNKEANDRIRKIIKENEDLIREAEERTR

SEQ ID NO: 22387 - protein, 59 aa, Artificial Sequence
  Synthetic
ELEERIKKANEDSKRTLRELMERVRKANEDSKRKLEEIREKVERANRESKKILDELRKA

SEQ ID NO: 22388 - protein, 59 aa, Artificial Sequence
  Synthetic
EKVIRELIKELKDVNRALEKKAKELIDELEEVDKDLEDKVRELIRKLKEVNEDLKRKAD

SEQ ID NO: 22389 - protein, 59 aa, Artificial Sequence
  Synthetic
SLKERVKKVLEESERNLEENKKDAKRVNDETRKKLKELEDRADRVNRETERALRELEDN

SEQ ID NO: 22390 - protein, 59 aa, Artificial Sequence
  Synthetic
EKVVREVIEELKRVNDKLNDASRRLNERLKRVVEDVERRVRDLNKELEDVVEELKERTR

SEQ ID NO: 22391 - protein, 59 aa, Artificial Sequence
  Synthetic
ELEERIKRVIDELRRRLEELRRELKRVNDKTEEDLRRLEDNARRVNDTSRKMLERLEDG

SEQ ID NO: 22392 - protein, 59 aa, Artificial Sequence
  Synthetic
ETVVREIIRELEKVIEELEREVRELNRELREVVERVAKKVRDLNRELEEVIRDVKRKVD

SEQ ID NO: 22393 - protein, 59 aa, Artificial Sequence
  Synthetic
SLEDEARELRRKSEKTNDELRRAIEELEKKVRDMIRRSEEHVRDLVRKVKRVIEKLEED

SEQ ID NO: 22394 - protein, 59 aa, Artificial Sequence
  Synthetic
RKDLEELIKELKKLNDESREEIERLIRELEELLKEIEDRNRKLAETLKRLLEEVEKRAR

SEQ ID NO: 22395 - protein, 60 aa, Artificial Sequence
  Synthetic
SIEEEIKELKDRSKKTNEELKKEIDELKEDSERTNRESRKHVKEVLDRLREILERLRREG

SEQ ID NO: 22396 - protein, 59 aa, Artificial Sequence
  Synthetic
RKEIKRLIDELTELNKRSKELIKRLIEELKKLNDDSRKENKRLVREVERLAEEVDRRVK

SEQ ID NO: 22397 - protein, 59 aa, Artificial Sequence
  Synthetic
SLEEKAKRLKEESDKTNKKLRELIERLERESRRTNEELRKKIRELLEDARRELDRLRKE

SEQ ID NO: 22398 - protein, 59 aa, Artificial Sequence
  Synthetic
EKKVEELRRDLERLDRESEKKIRDLIKTLDELNKESDRKIRKLEEELKRLLEEVEKRVR

SEQ ID NO: 22399 - protein, 59 aa, Artificial Sequence
  Synthetic
DIEKKIEDLRRKAKKVIDDLRKRSDELKKRSKDTNDRLREELKKLEEDVRRVIEDLRRR

SEQ ID NO: 22400 - protein, 59 aa, Artificial Sequence
  Synthetic
DKDIEKLIRDLEKLLRDVEERHEDLRRKAEELDRDTKEKVDRLIKELKDLLKEVRDRVR

SEQ ID NO: 22401 - protein, 60 aa, Artificial Sequence
  Synthetic
SLKEKLDDLVRKSDDTNKDLEEKARRLVEDAKRVLKELEDKSRRLVEEARKVLKRLEEEG

SEQ ID NO: 22402 - protein, 59 aa, Artificial Sequence
  Synthetic
DKKIKELIEELEDLDRRSKKAVEDLIKELKKLIDEVREIHDRLEEELRRLIKTVRDKAR

SEQ ID NO: 22403 - protein, 59 aa, Artificial Sequence
  Synthetic
SLEDKVRKLEEEIKKVLKEIREEVERLLEEDRRTLEDLKRRHRESDRESKEVLDEIAKK

SEQ ID NO: 22404 - protein, 59 aa, Artificial Sequence
  Synthetic
DKVIKEVIDTLRKRLEELKRRLEDVIREVRKANEDSERESRDVIRKLKELLERLKEKVK

SEQ ID NO: 22405 - protein, 60 aa, Artificial Sequence
  Synthetic
SEEEKLKEVKDRIREVLRKLEEHTDKVKKEVEKVLRDIRRTTDELKKEVRAMLERLRRKK

SEQ ID NO: 22406 - protein, 55 aa, Artificial Sequence
  Synthetic
DELVTEVEKLLRDDEETNRDVVKKVREAVKKDADTNRKVIEEVKKVLEDAARRLD

SEQ ID NO: 22407 - protein, 60 aa, Artificial Sequence
  Synthetic
SEEEKLERVERRLEKVLDEIRRHTEDVKRKDEENLDRLRKKIEKLKRELEKVLRDLEEKR

SEQ ID NO: 22408 - protein, 55 aa, Artificial Sequence
  Synthetic
DELVKKLEELLEEDKDTNRKVVKEIEDANRRVNEELDRVIEELKRILEELERRLR

SEQ ID NO: 22409 - protein, 59 aa, Artificial Sequence
  Synthetic
SEVDEVRKTLEDLLRRLDEENKDIIRRNKELLDDLDRKVREAIERLKRLLDELRKILEK

SEQ ID NO: 22410 - protein, 59 aa, Artificial Sequence
  Synthetic
EELARRITELEKRVREVIERLKEKNKRLEDDSRRVITELRKKLKDLEDRVREEIEELRK

SEQ ID NO: 22411 - protein, 58 aa, Artificial Sequence
  Synthetic
SEVERVKEELKRLLEDLDRKNKRMIDEDERLNKELNEENERLIRELEELLKRLKEIRD

SEQ ID NO: 22412 - protein, 59 aa, Artificial Sequence
  Synthetic
EEVKREIDKLREEIREVIERLDKKNEDVLRKSEKNVRDLNRENEEVLRRATEAVRELER

SEQ ID NO: 22413 - protein, 59 aa, Artificial Sequence
  Synthetic
DEVDKVTRTLEELLKRLEEENRKMIEDDKRLNEELNKENRRVEETLRKLLKELEDIRKD

SEQ ID NO: 22414 - protein, 59 aa, Artificial Sequence
  Synthetic
KEVKEKIDRLEKRIRDAIRELNERNKKALDDSERNVRELNKRNERLREEVERKIRELER

SEQ ID NO: 22415 - protein, 59 aa, Artificial Sequence
  Synthetic
SEVDEVAKRLRDLLRELEEKLKRAEDRDRKLNDDLNKTNKKLIKELEDLLRKLEEIARR

SEQ ID NO: 22416 - protein, 59 aa, Artificial Sequence
  Synthetic
DEVRRKIDELEREIKEVVDRLRRRLEELLRRSKENVDRLNRENDRVLEEAKRKIRELEK

SEQ ID NO: 22417 - protein, 59 aa, Artificial Sequence
  Synthetic
SEVDEVADRLEKRLKENRDKNKRVEDEDKRLNKELNDTNRRMEEELKRLLTEIDDIRRK

SEQ ID NO: 22418 - protein, 59 aa, Artificial Sequence
  Synthetic
EEVRKKIDELERRLKEVIDDSKRRNDELERESRENVRELNRRNKELEDEARKEVERAKK

SEQ ID NO: 22419 - protein, 59 aa, Artificial Sequence
  Synthetic
SRVDEVIERLERLLRELDKINRDMIEDDKRLNTELNKENKEVEDRLRRLLEELEEIRKK

SEQ ID NO: 22420 - protein, 59 aa, Artificial Sequence
  Synthetic
KEALDKIRRLEERARRVIEELDEKNRRALERSKENVKRLDERNERLRKELEEKVRRLRK

SEQ ID NO: 22421 - protein, 58 aa, Artificial Sequence
  Synthetic
DVEEKVKKVIRELREVLKEIEERVRRVLERNKRSLEDLKRKHKESIDRAKEVLDEIRK

SEQ ID NO: 22422 - protein, 59 aa, Artificial Sequence
  Synthetic
EEALKRLEDKLREKLRDLRRKLDELRKENEKVNRDLEDKTRRVIEKLKRVITKLKEEVK

SEQ ID NO: 22423 - protein, 60 aa, Artificial Sequence
  Synthetic
SEIEEVEKRLEDVLRKVNKKTEDLMRSVKEIIKRSREHLEKVIRDLEEILKELRELRKRG

SEQ ID NO: 22424 - protein, 59 aa, Artificial Sequence
  Synthetic
EDVKRRIEEVEERLKRDNERNNKKIEDVNRDNRRVAEELRRRVEDVKRKIEKVLRELKK

SEQ ID NO: 22425 - protein, 59 aa, Artificial Sequence
  Synthetic
DVEELLDRVTKRVEKALRELRKKVRELKEENRKSVEELEETSKRLKKEVDDVERRLEAG

SEQ ID NO: 22426 - protein, 59 aa, Artificial Sequence
  Synthetic
REKLKKVLEEIEKILKEIEDKVRRVIEKSRRINEENKETNRRVIEDVRRLLKKAEEDLR

SEQ ID NO: 22427 - protein, 60 aa, Artificial Sequence
  Synthetic
RVEERLDEVRKKIDEVLKRLRDTTKELEDENEESLRKLKKEVDEVRKKIEEVLKRLEDAN

SEQ ID NO: 22428 - protein, 59 aa, Artificial Sequence
  Synthetic
EEKLEKVDREIEEILRRNKRTNEKVAEESRKINREAEERLRRVIEELEKILKEIEDRLK

SEQ ID NO: 22429 - protein, 60 aa, Artificial Sequence
  Synthetic
SVEKKLKDVEDEIRKVLRELEETSKKLDKEVDDMLKKLKDSTEEVKKEIDEMLKRLEERR

SEQ ID NO: 22430 - protein, 59 aa, Artificial Sequence
  Synthetic
DEKLDKVVKDLRKLLEDDKRTNKEVIDRVRRKLEENKETNEKVIKELRDILREIEERAR

SEQ ID NO: 22431 - protein, 60 aa, Artificial Sequence
  Synthetic
SEIEDVARRIRKLLEELRRRIRKIAEDSRRLNRRLEERNTEMEKEIKDRLRKLEEELKRK

SEQ ID NO: 22432 - protein, 59 aa, Artificial Sequence
  Synthetic
EEVKEKIDRLEKEIRDMLKELRERIKRLKDENEKSLEDLRRRNTELEEEVRRVIRELEK

SEQ ID NO: 22433 - protein, 60 aa, Artificial Sequence
  Synthetic
SELEKVAEDIRRLLKRNEEINREMIKRSRELNEELRERNREVTERIRRLLERLKEERKRT

SEQ ID NO: 22434 - protein, 59 aa, Artificial Sequence
  Synthetic
DELEKKLRDLEREIRKVLREAKRLNDELRKENKESLERLKRENDKLRKEVETVIREAEK

SEQ ID NO: 22435 - protein, 60 aa, Artificial Sequence
  Synthetic
DEIEEVIRRIKRLLDENRKKNEEMSDRSRKLNERLRKIIKKIIDEITELLKRLEDRARTV

SEQ ID NO: 22436 - protein, 59 aa, Artificial Sequence
  Synthetic
RKVDKKIEDLRKEIEDVLKELAERNKENKDRNKKSADELRKEIEDLERKVREVIRELTR

SEQ ID NO: 22437 - protein, 60 aa, Artificial Sequence
  Synthetic
RVEDEIRRLEEEARRVLRELEDLLRRLKKKNDESNKEIRERIERVRRKAEKVLRELERRG

SEQ ID NO: 22438 - protein, 59 aa, Artificial Sequence
  Synthetic
ERVIERLIRELRRLLEDVKRKAEDLIRKSEDLNEKWRKELKKLEREIERLLKEVADRVK

SEQ ID NO: 22439 - protein, 60 aa, Artificial Sequence
  Synthetic
EAEKELKRVEDRDKESNDRTKDILRRIEKEVRESNKRSKEILDEIRKRVRDVIEELRRKR

SEQ ID NO: 22440 - protein, 59 aa, Artificial Sequence
  Synthetic
EETVRRLKDELEEVNERTERAVRDLLRKARKVDDESRRRVEALLRKVEEVLREIKRRVD

SEQ ID NO: 22441 - protein, 60 aa, Artificial Sequence
  Synthetic
SFKETLDEIRKRVKEVLDKLEKILRDIARRVEKVNKENEDRLREINRRNEEVLRRLKKKG

SEQ ID NO: 22442 - protein, 59 aa, Artificial Sequence
  Synthetic
EDKLRELLERLERLLRELERRVEKIEEDLKRILDEVRKRTKELLERNERILEKLERDAD

SEQ ID NO: 22443 - protein, 60 aa, Artificial Sequence
  Synthetic
SIEDIVREIRERNKDAKRKVEDIVRRNREEIDKVLKRVEKILRDNEKRIREVKEELKERV

SEQ ID NO: 22444 - protein, 59 aa, Artificial Sequence
  Synthetic
EKDLDKVRKESEDNLREILRTLKEVHERSKETLKRIEDTLRRVHKKSEDELRRLREEVR

SEQ ID NO: 22445 - protein, 60 aa, Artificial Sequence
  Synthetic
SIEEIAKTIKEEIKEVMDRVREIVERDEREIKKVKEEVDRIAKRNEDEIRKVKDELDKKV

SEQ ID NO: 22446 - protein, 59 aa, Artificial Sequence
  Synthetic
EEAMKEVADRVRKKLEEIERTLEEVHRKSRKVLTEIIKKLKENHDRSKELLDRIREEVK

SEQ ID NO: 22447 - protein, 59 aa, Artificial Sequence
  Synthetic
SEVEEVLKEIKDLLRRLEEIVRRVLKENRRLLEEDVRRTEEILEELERLLDELRKDIKR

SEQ ID NO: 22448 - protein, 56 aa, Artificial Sequence
  Synthetic
EELLKRIEDEVRRVEDKLRKLIKRSKEESDKVAEELERLNREARKRIRDVMEELKR

SEQ ID NO: 22449 - protein, 60 aa, Artificial Sequence
  Synthetic
DEAEEILRRLKKLLEDAKRISDRTVEKNREMLKKIEEDSKRSLERNRELLKRIKELAKDI

SEQ ID NO: 22450 - protein, 56 aa, Artificial Sequence
  Synthetic
REIIERLKEEVDRLLKELRDSNRELKRESDEVVEKLRELNKRSKEEADKVEKDLRR

SEQ ID NO: 22451 - protein, 60 aa, Artificial Sequence
  Synthetic
SEVDEVLKRLRKDLDKVRKDSKKSLEELRRVLEEVERLSDESVKRLEEVLKRLEDLIKDI

SEQ ID NO: 22452 - protein, 56 aa, Artificial Sequence
  Synthetic
REIIKKLADEVREVLERLKELNRRLEKEARDAKRRLEESNDRLRRKVEEVIKELRR

SEQ ID NO: 22453 - protein, 60 aa, Artificial Sequence
  Synthetic
SEVEKLLDESRRVVEENRRANKKLAEESRKAVRRNREESKRLNEELREVVERARRKVTER

SEQ ID NO: 22454 - protein, 56 aa, Artificial Sequence
  Synthetic
EESLRRIKRTHEETEKESEKTLRDLEDEHRKTIEELERSLKELRDRIKKVLDELRK

SEQ ID NO: 22455 - protein, 56 aa, Artificial Sequence
  Synthetic
DEVEEVLKKARKDIERWREETRKVKEENKRNIDRIRKKLEEVLRDLKRAIDEIRKS

SEQ ID NO: 22456 - protein, 55 aa, Artificial Sequence
  Synthetic
REVLEEIRKLLRDIKETDRKVHEELERSNEKLRREIEKILRDLEDELRKLRRERE

SEQ ID NO: 22457 - protein, 57 aa, Artificial Sequence
  Synthetic
SEVEEVLRRAEKAIREWEEETRRAKEENEKNIKKVADDLRRLLEDARRTIEEIEKRR

SEQ ID NO: 22458 - protein, 55 aa, Artificial Sequence
  Synthetic
EEVLKEIKKLIDTARRKDEKVHKELEDTNRDLDRAIEEVIREIKKLLDDLREKAR

SEQ ID NO: 22459 - protein, 60 aa, Artificial Sequence
  Synthetic
SEKEDVLRRIKELLERLHEENREVLTRIEKLLKDNKERNDDVLRRITELLKEVTKRAKDR

SEQ ID NO: 22460 - protein, 56 aa, Artificial Sequence
  Synthetic
TEEVRKRVEDVVRKNKEVARELLDRVRKLSERNKRAIDKLLEEVKRVLEEVERALK

SEQ ID NO: 22461 - protein, 57 aa, Artificial Sequence
  Synthetic
DEERDVRREIRKLLRDAEEHSKKLNEESKKTNKRNEEENRKALEDNKRLLKEVEDRI

SEQ ID NO: 22462 - protein, 56 aa, Artificial Sequence
  Synthetic
VTELRERIKRLIEEIERLNREFKKKNEELSKKNKELVERSRTESKKLVDEARERAR

SEQ ID NO: 22463 - protein, 60 aa, Artificial Sequence
  Synthetic
DSEEEVRKRVKDLSEENKRLVKTAEKRVRELSKENKELVERLKREVDRIKKEIEELKRRG

SEQ ID NO: 22464 - protein, 55 aa, Artificial Sequence
  Synthetic
EKVLREIREIVKKNKRENEEVLRRIRELVKENNDENKRVLDEIEKLLKEIEDESR

SEQ ID NO: 22465 - protein, 61 aa, Artificial Sequence
  Synthetic
SEMDEVRKKLRELVERLKKEAERSRKSHREILKKVRDDLKRSEESHKELLDRLEEVLKRTV

SEQ ID NO: 22466 - protein, 59 aa, Artificial Sequence
  Synthetic
EDKLRRLLEEAAEVIKRLLDEVKRLNEHAKRMAEKILEDVKRLNKHAEDKVRDVEEKVK

SEQ ID NO: 22467 - protein, 61 aa, Artificial Sequence
  Synthetic
RELEEVARRLERLLDELRKKLRESERSVRRLLEELKKELEKLRKRHEDLLRTVKKKLDDTV

SEQ ID NO: 22468 - protein, 59 aa, Artificial Sequence
  Synthetic
EEELKRLLEEVEKAIRELLERVERLNRRLEEEIRRVLEDLERIIRHAEEDLRRIEEEVK

SEQ ID NO: 22469 - protein, 61 aa, Artificial Sequence
  Synthetic
RELEEVKKKLEKLAKDLRDTLERSARSVEELIKRLEDELRRSEESHKELLERLEDTLRKRA

SEQ ID NO: 22470 - protein, 59 aa, Artificial Sequence
  Synthetic
EEELRKLLKDATEEVRRIAEEVKKLNDELRRAVEEVLKEVRETNKHVREMIETVREEVE

SEQ ID NO: 22471 - protein, 61 aa, Artificial Sequence
  Synthetic
SELEEVAKRLKELVDDVRRALKESDDSHKELLKRLKEKLDEVRKRLKKLVDDLEETLKRTL

SEQ ID NO: 22472 - protein, 59 aa, Artificial Sequence
  Synthetic
EEELERLVREVERVIRKLKEDVKRLNDHAREKVKRVEEELRREEKRVRDEVERVKEEVR

SEQ ID NO: 22473 - protein, 61 aa, Artificial Sequence
  Synthetic
SELERVEDEARKLADDLRRMLEESRRSHEKILREVEEELKKSEESVRRILERVKEVLDRKL

SEQ ID NO: 22474 - protein, 59 aa, Artificial Sequence
  Synthetic
EDELRELLDRLRKAIKKLLDDVKRLNDHVKELIERIRDEVRRLNRRLEEEARDVERRVE

SEQ ID NO: 22475 - protein, 61 aa, Artificial Sequence
  Synthetic
DELETVREEIERLARELEKELKKSEDSVEKLLRELKERLKEVRKRHKELLDRLRDRLRKTV

SEQ ID NO: 22476 - protein, 59 aa, Artificial Sequence
  Synthetic
EEELRRLVEDVKRVVDEVLERVKELNKRLEEAIRRILEELKKIEKNVKDFIEDIDRRVK

SEQ ID NO: 22477 - protein, 61 aa, Artificial Sequence
  Synthetic
RELEEVKRRLEELLERLRKELERSDKSHKELAKKLRDELERVEREHERLLRELEDTLRKTL

SEQ ID NO: 22478 - protein, 59 aa, Artificial Sequence
  Synthetic
EKELTDLLREAKRRVEEVLKEVRDLNRNVKETVDRVLKELEDILRNVEEMIKEIKDKVR

SEQ ID NO: 22479 - protein, 56 aa, Artificial Sequence
  Synthetic
SDAEDILRKVEDLIRRLAEKHRDLLRRSKENAERIKREHDDHHRDIRRVIKEIEDN

SEQ ID NO: 22480 - protein, 55 aa, Artificial Sequence
  Synthetic
RELLKTVRDLLETLREINDRVREELRKIHEDVERRNKEVLDRNKKLLEELERKRR

SEQ ID NO: 22481 - protein, 58 aa, Artificial Sequence
  Synthetic
SELEDIERKLKELEDEDRELNRKLNDDTRRLDERNRRLNEELTKKLREVEEEAKELRK

SEQ ID NO: 22482 - protein, 55 aa, Artificial Sequence
  Synthetic
ERVREKIERIAKKLEDDNKESEDRHRRINEENRRRNDKNREDIERILRRLDEELR

SEQ ID NO: 22483 - protein, 58 aa, Artificial Sequence
  Synthetic
KELEEVDDEVRKEAEEVKRYIKESKEKLDRLRREDERLNDRVREKVEDVRRRVEERRS

SEQ ID NO: 22484 - protein, 55 aa, Artificial Sequence
  Synthetic
ERVKRKVDKIERELEDAIRRANEEHTKIEEDLRRRNKESKDEIRRILEELEERTR

SEQ ID NO: 22485 - protein, 60 aa, Artificial Sequence
  Synthetic
REIETVRREIEKILDDLRRTVKRIEDEVRKIHEDLRRSLEDSKRNIEEILKDLERAARRD

SEQ ID NO: 22486 - protein, 59 aa, Artificial Sequence
  Synthetic
KKDIDKLLKELRDLVEKIKKDLKELLERYEEIVRRIKELLKDLNREAEEVVRRLKEELR

SEQ ID NO: 22487 - protein, 60 aa, Artificial Sequence
  Synthetic
DEEERAEREIKKLLDDLRRTLEEVKEAIRRILEDNRRTTKRINDEDRKINDDLRRTLERR

SEQ ID NO: 22488 - protein, 56 aa, Artificial Sequence
  Synthetic
VDKVLKEVEETIDRVKKDIRRALREVEETSKEDKKRLREVLERSKDLARRLKEKLK

SEQ ID NO: 22489 - protein, 60 aa, Artificial Sequence
  Synthetic
SREEEAERRIEKLLRELEKTNRDIHEEIRKILERLRRTLKKVNDEDEKLNRDLEDTLRRR

SEQ ID NO: 22490 - protein, 56 aa, Artificial Sequence
  Synthetic
VEDVLRRVKEIIDRVKEEHKRMLEEVRKIAKDLEEKIRAVLEESKKLAEDIKRRLT

SEQ ID NO: 22491 - protein, 60 aa, Artificial Sequence
  Synthetic
REEEKAEEDIRRILRDLKETNRRIHEEIKKLLDDNERTLRRINEEDKKLNEDLRRTLEES

SEQ ID NO: 22492 - protein, 56 aa, Artificial Sequence
  Synthetic
VEEVLKTVEDIVRKVKREHEELLKEIEDLSRENKKDNERMLEESRRLARKLKEELR

SEQ ID NO: 22493 - protein, 60 aa, Artificial Sequence
  Synthetic
SEEEKMEEDIERLLDRLRRINKRLHDEHKKLNEDNERTVRRIDEEDKRINEDLERTLRES

SEQ ID NO: 22494 - protein, 56 aa, Artificial Sequence
  Synthetic
VRKVLEDVERIIRRLEEEHRRALEESRKRSEENKRENEEMLERSKELAERIKRRLK

SEQ ID NO: 22495 - protein, 60 aa, Artificial Sequence
  Synthetic
SEEEKAREDIKRLLEDLRRTNKKIHEDIEDILRELKETLKRVNDDDKRINDDLDRTLKER

SEQ ID NO: 22496 - protein, 56 aa, Artificial Sequence
  Synthetic
VEEVLRTVEKIIEDVKKEHEDLLKRVKDIVKKIKEEIEKVLRESEKLAREIKEELR

SEQ ID NO: 22497 - protein, 60 aa, Artificial Sequence
  Synthetic
SEEDELRKRVADILKRLREVNKRLHDEVKRLLKENRDALKEVKDKIRESNRELDEVLKRR

SEQ ID NO: 22498 - protein, 56 aa, Artificial Sequence
  Synthetic
VEEVLERLKEIVRKAEEEHKDVLRRLKEISDRHKRRLEEAERRNEKLLRDLKEELR

SEQ ID NO: 22499 - protein, 59 aa, Artificial Sequence
  Synthetic
SRLEEMLKRAEDLSRESEELLRRVLEEVKDLSRKHEEALREILKRVKDLVDTVRDLLRR

SEQ ID NO: 22500 - protein, 58 aa, Artificial Sequence
  Synthetic
EEVRKLEEELKRLLEENRRLAKELRDELRRLTKRNKDVVREVERRLEEIMKEIDKEVR

SEQ ID NO: 22501 - protein, 60 aa, Artificial Sequence
  Synthetic
SEDERIKKELRKVEREVDKLLKEHEKILEDLKREVDKLIETHRKILEELKRRVDELKRRG

SEQ ID NO: 22502 - protein, 55 aa, Artificial Sequence
  Synthetic
ERIRRELEEVLKDIRRKLKELKERNDKVNRDIEELLRELEERNTEVDKEIKKKAD

SEQ ID NO: 22503 - protein, 56 aa, Artificial Sequence
  Synthetic
DEEKEAEDLIEEHRRRSEEIARRADKLSEDHKRKVDEIAKTVEKLIRTLKEIVDRK

SEQ ID NO: 22504 - protein, 55 aa, Artificial Sequence
  Synthetic
KELKDRVERVLEESRELLERLRKKLEDNSKEVEDILRKLRKEVEDVVRKIRKRAE

SEQ ID NO: 22505 - protein, 56 aa, Artificial Sequence
  Synthetic
RDEDEVRKLITRHEKLSRDIAERLKRESKKHRDDVERIAKENEELNRRLREIVKKK

SEQ ID NO: 22506 - protein, 55 aa, Artificial Sequence
  Synthetic
KELKDDVRRVLKKSRDELKRLREELKRNSEEVERILKKLDEDNRRVLKEIRERLT

SEQ ID NO: 22507 - protein, 63 aa, Artificial Sequence
  Synthetic
DKEREVRRRVEELKKDSEDVLRRNREEVEKLHDENRKVNEESDRTAKELVEEAERMLREARKK

SEQ ID NO: 22508 - protein, 55 aa, Artificial Sequence
  Synthetic
EELLKELKKELDRLREENERSNRRLRKMLEELKRKNEEVNRELRKKLREIKERLR

SEQ ID NO: 22509 - protein, 57 aa, Artificial Sequence
  Synthetic
SEEERLERTVEEVEKALKKLADDLRRDMDRSRKSHEDLLDKLRKELDRVLEEIRKKT

SEQ ID NO: 22510 - protein, 55 aa, Artificial Sequence
  Synthetic
EEVEKRLRELLDEARREVERILKDLRELNEHVRRRVDEVRRRLEELLERLDRETR

SEQ ID NO: 22511 - protein, 56 aa, Artificial Sequence
  Synthetic
DEKREVEKELKRVDDEIKRLLRELEEALRRDKEEVDRLDKEVKDALDEVRERIERA

SEQ ID NO: 22512 - protein, 55 aa, Artificial Sequence
  Synthetic
EKVKEDLKRLLEEVEKAVRKVVEDSKRLHDEAKEAVDRNKEHLRRLLEDAKRRAK

SEQ ID NO: 22513 - protein, 56 aa, Artificial Sequence
  Synthetic
SEKERAEEEIERSKRNLERLLEEAKREIDRSRENLKRTLTKVEEVLRKIKEDLKRL

SEQ ID NO: 22514 - protein, 55 aa, Artificial Sequence
  Synthetic
EKLIRELRELNKRLAEEIKRLIDELRKLNKELDDEVEKIIRRAEDLLRDLERETR

SEQ ID NO: 22515 - protein, 57 aa, Artificial Sequence
  Synthetic
SEVEKVIRDLEEINKRLLEEIKRSIEENKRTNEEAERKVKEVIDRLRKLLEDLKRTN

SEQ ID NO: 22516 - protein, 59 aa, Artificial Sequence
  Synthetic
EDRLKRVEDVLRESVKNLKRLVDEVRKANRESNEHLKDLARKVEKVIREIEEEVDRTRT

SEQ ID NO: 22517 - protein, 59 aa, Artificial Sequence
  Synthetic
SELERLVEELRRALEKHKRRLEELKKELKKALDDHRREVKRLIDELKKTLDDVRKASRI

SEQ ID NO: 22518 - protein, 59 aa, Artificial Sequence
  Synthetic
ERLLEDVKRILDEVRREVEKLDTDADRRLREVKEEVERINREVEKTLRDVEEDLDRLKK

SEQ ID NO: 22519 - protein, 59 aa, Artificial Sequence
  Synthetic
SEVEKLKEDLKRALDEHRKRLEELKKELEDVLRRHEEKVRRLKEKLKRILDEIRRLSRI

SEQ ID NO: 22520 - protein, 59 aa, Artificial Sequence
  Synthetic
ERLLEDLDRALDEVRKEVEKLNRDAKRTLDKVREDVKRLDDDLRRTLKRVKEEIDKLTK

SEQ ID NO: 22521 - protein, 59 aa, Artificial Sequence
  Synthetic
DEIEELKKRLRKILEEHRKRVEDLKKENEDLNRRAEETLERLKRELEEMLREIAERSRI

SEQ ID NO: 22522 - protein, 59 aa, Artificial Sequence
  Synthetic
ERILEDLKRVIERVEREVRRLNKDLKRALDESRKRIEDWLKELDDVIKRVKREVEKIRT

SEQ ID NO: 22523 - protein, 59 aa, Artificial Sequence
  Synthetic
SEAEKLKKELEEVLERARRRLTELKEENKDANRRHRRRLEELKKRLEDVLKKVKDDADI

SEQ ID NO: 22524 - protein, 59 aa, Artificial Sequence
  Synthetic
ERILRRLEEVIRRVDRDIKELIKDAREVLERSKRDVERWNREMKKVLDEVRKRVEEIRT

SEQ ID NO: 22525 - protein, 56 aa, Artificial Sequence
  Synthetic
SEDEDAKRELRRVKEEVDKTLEDSKRVHDESRKRAREWLEDSKRVHREVKERLKEL

SEQ ID NO: 22526 - protein, 55 aa, Artificial Sequence
  Synthetic
EELKRELERVLEEHRRSLEKNKRDVERINEELKRRLDRNKEELRKILEDVERRRR

SEQ ID NO: 22527 - protein, 55 aa, Artificial Sequence
  Synthetic
SEEERLRREVKRVEDENRKLLERLREIAERVHRENKRLLDESRRIADKVRRDLDR

SEQ ID NO: 22528 - protein, 56 aa, Artificial Sequence
  Synthetic
LEEVLEELERVLKRLEEEHRRVVKELRDLLRRIKEDHDRLVEEAEEILREIDERAK

SEQ ID NO: 22529 - protein, 56 aa, Artificial Sequence
  Synthetic
SEEEEADKAIRTIAKAIEDLVRDLERALKESKRNIEELAKDLKRANDRIEEELEKA

SEQ ID NO: 22530 - protein, 55 aa, Artificial Sequence
  Synthetic
KELADRLRDLLRDAKRVVDRIKRALEELNKEAKKLVERAKKKHDDLLEDVKRDTK

SEQ ID NO: 22531 - protein, 56 aa, Artificial Sequence
  Synthetic
SEEEDAKRVLDEIREELKKLNDDVRRALKESKENIDRIIEDLDRTNKRIEEELDRL

SEQ ID NO: 22532 - protein, 55 aa, Artificial Sequence
  Synthetic
EELKERLKRLLERVREEVKRNKEHLERLNKKVKEDVDRLKKRHKDTLDEVDERRK

SEQ ID NO: 22533 - protein, 60 aa, Artificial Sequence
  Synthetic
KLDEDLEKVIKEVKERLKESLDRHKEVAKRLEEEVKRSEEEHRKVLEEAKRKLEEIKTKT

SEQ ID NO: 22534 - protein, 59 aa, Artificial Sequence
  Synthetic
DRTVRKVERELRDLIRRLEKRNEELIRRVKEIVERMEKTNRDLIRRIRELIKKVEDDVR

SEQ ID NO: 22535 - protein, 63 aa, Artificial Sequence
  Synthetic
SEEEKLKRVLDEFRRAVKELLEDLERANERAKDEVRRLLEDLDRAHERIRRAVEKLKERVKDK

SEQ ID NO: 22536 - protein, 55 aa, Artificial Sequence
  Synthetic
KDLEKRIRDTLREIKKRVEDVKRDNKRVLDELRKKIEENKKRNEDVLKEMEDKTE

SEQ ID NO: 22537 - protein, 60 aa, Artificial Sequence
  Synthetic
SDAERVKKESKDLLDTTKRLADRLKELLERLNKETRDRVREVIKEIERLVDEVEKEARKG

SEQ ID NO: 22538 - protein, 59 aa, Artificial Sequence
  Synthetic
EDIRTDLEDVLRRNKEALEEIRKDIERVNRKDREELREIARTLEKVLRDARRRLEELRR

SEQ ID NO: 22539 - protein, 59 aa, Artificial Sequence
  Synthetic
SIEDDLRRVLERSKRSLEELKRKADRVLEESKKNVRDLERELKRVLEKIKETIDKLRKD

SEQ ID NO: 22540 - protein, 59 aa, Artificial Sequence
  Synthetic
KEEVERLIRELDRVNEELAREVERLIRELEEVNRRVNEDLKRLIRELERALKELDERVR

SEQ ID NO: 22541 - protein, 57 aa, Artificial Sequence
  Synthetic
DEVDELIKRLEERNEELNRKAKRIIEKLKKENDDLNRKLDEIVRKAREDIEDAERRV

SEQ ID NO: 22542 - protein, 59 aa, Artificial Sequence
  Synthetic
KDLEDKLEEVLRRSKKNIEDVEKELRDVLRAAKKNLDDLRRKLEDVLRRLRDEIRRKKK

SEQ ID NO: 22543 - protein, 57 aa, Artificial Sequence
  Synthetic
SDVDRIITELRDINREVNRRVKRLIEELEELNRRLNEKAKRDMDEIRRLIEEAAKKL

SEQ ID NO: 22544 - protein, 59 aa, Artificial Sequence
  Synthetic
EDLKRKLEKVLKEARDNLEEVKKRLKEVLERSEENLRRLEEELRRVLEEVREMLKRKKD

SEQ ID NO: 22545 - protein, 57 aa, Artificial Sequence
  Synthetic
KDEEKIKRVLDDVERVLKENEDRNRELLKRVRERLEESRDHLRRVLEDVKRVLEELK

SEQ ID NO: 22546 - protein, 56 aa, Artificial Sequence
  Synthetic
VDELVKRIKDLLKRLNEISRRIAEEIKELLRTHDELNERVVRKLRDLLRKAREKRR

SEQ ID NO: 22547 - protein, 56 aa, Artificial Sequence
  Synthetic
SEEEKLKRVLEDVERDLRRNKRENEKSLEESKKVNDDNRRRNKEALDEVKKVLEDL

SEQ ID NO: 22548 - protein, 56 aa, Artificial Sequence
  Synthetic
DEELVDEIRKLLERLNEISERIHRRNKELDDELNEISKRIRERIEDLKRRAEERAR

SEQ ID NO: 22549 - protein, 60 aa, Artificial Sequence
  Synthetic
SEEDEIRRLLKENEDSTRRVEEDNKRLNDENEKSTKRVEDDIRRILERVRRELDDLRRRG

SEQ ID NO: 22550 - protein, 56 aa, Artificial Sequence
  Synthetic
REEIEREVREDNKRLEELLERSEREVREDNKRLDEALKKIEKEARELVKRMREKAK

SEQ ID NO: 22551 - protein, 59 aa, Artificial Sequence
  Synthetic
REEEEIRRLLKENEESTRKVEEDNKRLNDENRRSTEKVSRDLEDLNRDTRRVMEEAERR

SEQ ID NO: 22552 - protein, 56 aa, Artificial Sequence
  Synthetic
LEEIKREVEEDNERLKELLKRSEKEVREDNKRLRDVLEKSREEHERLKKRLEEAAK

SEQ ID NO: 22553 - protein, 60 aa, Artificial Sequence
  Synthetic
SEEDEIRKLLEKNEKSTEDVERENERLNDENRKSTEDVKREIDRLLKELREVLDEARKKG

SEQ ID NO: 22554 - protein, 56 aa, Artificial Sequence
  Synthetic
LDEIRKTVEEDDKRLKDALERSKREVDDDNRRLKKVLDEIRKTVRTMIEEIKKAEK

SEQ ID NO: 22555 - protein, 61 aa, Artificial Sequence
  Synthetic
SEKEKADDLRRKSKESNDTLRKRLDELKKRSEKNNEELERRLRALLKRLEDVLREITKRTG

SEQ ID NO: 22556 - protein, 55 aa, Artificial Sequence
  Synthetic
DELVKEVEDLNRELEEKVKRLIEEMEELNKRLNDKVKELIEEVERLIKELEDRVR

SEQ ID NO: 22557 - protein, 61 aa, Artificial Sequence
  Synthetic
KDIDELIKRSEDLTRDLERKNKEVVDKIEELLREHEKTNREVVKELRRLLDEVRERVERRG

SEQ ID NO: 22558 - protein, 59 aa, Artificial Sequence
  Synthetic
EDLERKVRKAEEDNKRAVERSKTHVDEVRKEVERVLRESKRHAEKLAEDVERMIRELER

SEQ ID NO: 22559 - protein, 57 aa, Artificial Sequence
  Synthetic
STLEKLKKDLDDIDRDLERILDELRRRVERIDEELRKIVERLHRRNKEIIERLRKAK

SEQ ID NO: 22560 - protein, 55 aa, Artificial Sequence
  Synthetic
REIREAEKKHKKVLDDLRRKLEEVEKRHREVEKELRDRLEESRREHEKVIREETE

SEQ ID NO: 22561 - protein, 56 aa, Artificial Sequence
  Synthetic
RELEELEKEVRKRLKEAEERVRDLAKKSRDLNRELKDRLRRIVEENRDVNRKVKEK

SEQ ID NO: 22562 - protein, 56 aa, Artificial Sequence
  Synthetic
DEDLRRVEEEIRRVIERLKRLLERVEEENRKSRKELRETLERLHRENEKSLREKET

SEQ ID NO: 22563 - protein, 60 aa, Artificial Sequence
  Synthetic
SLKERLDRVEEKIRKVLEELDRSTSRVEKKVEEVLRELKRSNDEVRKEIKKVLDELRKRG

SEQ ID NO: 22564 - protein, 57 aa, Artificial Sequence
  Synthetic
VVDEVAKRMTEELKKLDKENKEIEKEVDDILKRLKDEDKKTVDTLRKILKELDDDAR

SEQ ID NO: 22565 - protein, 60 aa, Artificial Sequence
  Synthetic
SEIEEVEKEMDKLAEESNKLNEEALRRVRKLLRDSNELVRELERRVRELIKRAKDLKREG

SEQ ID NO: 22566 - protein, 59 aa, Artificial Sequence
  Synthetic
EEVRRKIKEIKDRSEENIKRSRDSVREIKKESDENIKRLKRELERIKKRLEEVLRDLKR

SEQ ID NO: 22567 - protein, 59 aa, Artificial Sequence
  Synthetic
KDEEDLAREVKRVIDELEKLNEELNRAAEELIKRAEEINERVNRKVEKVERDLDKLKKR

SEQ ID NO: 22568 - protein, 55 aa, Artificial Sequence
  Synthetic
ETLRKLRDDLRKALKKSEDNIEDVRRRLEEVLERARRNLERVRRRLEEVLRKLKE

SEQ ID NO: 22569 - protein, 60 aa, Artificial Sequence
  Synthetic
SAAERLEKAVRDLIEELKRLNEELNKAVKEIIRRLRELNKKLNEDAERLIRKADELKRRG

SEQ ID NO: 22570 - protein, 56 aa, Artificial Sequence
  Synthetic
KEILDKLREELKRALEESEENLRRLRRELTEVLRESRENLERLKEEVERVLKRLAD

SEQ ID NO: 22571 - protein, 58 aa, Artificial Sequence
  Synthetic
SVVEDLEEKVKRLIERIERENRRLNKDADRLVRELDELNERLNRAIRRLIRKAEEARK

SEQ ID NO: 22572 - protein, 56 aa, Artificial Sequence
  Synthetic
ERELERLKRELEKVLRESEKNLEDLERKLKEVLDRSRENAKRLEDELREVLERLRK

SEQ ID NO: 22573 - protein, 58 aa, Artificial Sequence
  Synthetic
SVVEDLAKKVEELIRRLEELNKELNKRVRDLIEKLRDINRKLKREVERLIEEAEEVRR

SEQ ID NO: 22574 - protein, 56 aa, Artificial Sequence
  Synthetic
KDELKKLEERAREVLRKSEENLKRVEDELREVLRESEETLKRLEEELRRVLDELRK

SEQ ID NO: 22575 - protein, 60 aa, Artificial Sequence
  Synthetic
DEEKKAEDDIRRIHRRNEDLLRRHREITEEIEKRIRELLREHREITKRLERRLRELKKEG

SEQ ID NO: 22576 - protein, 55 aa, Artificial Sequence
  Synthetic
EELKRIKKRLDESLREVEEDLKRSEKRLRELLKRVKEDLDRSRKRLKEILDELRR

SEQ ID NO: 22577 - protein, 60 aa, Artificial Sequence
  Synthetic
DEVRKLEEDVERLRREVEEENRRLEEEVERLRKEVKERNRELNERVKTLIETAKRLKEAG

SEQ ID NO: 22578 - protein, 56 aa, Artificial Sequence
  Synthetic
EEMLRELEKRLKRLADETRRSNKELKERLERLKDESRDNNRELKERADRLLEKLKE

SEQ ID NO: 22579 - protein, 60 aa, Artificial Sequence
  Synthetic
SEEEELRKLERRLEELMKEYKEALDKLREEHEKTLREYEKRVEDLEREHKKVLKKLVDDR

SEQ ID NO: 22580 - protein, 56 aa, Artificial Sequence
  Synthetic
LDDLRRKVDKLRKEVEDHVRELEKKSRKLVEELKDHLRKLEEESRRLNRELEERSR

SEQ ID NO: 22581 - protein, 56 aa, Artificial Sequence
  Synthetic
SKEDLRRELDRVNEESKKHLDKLRKEAEEVLERLDRANKKIIEDAEEILRRIEKKV

SEQ ID NO: 22582 - protein, 56 aa, Artificial Sequence
  Synthetic
RERIKREIEENRKRNEEIARKIKEDIERARRDLERLRKKHEEELEKLKKRVEDADR

SEQ ID NO: 22583 - protein, 60 aa, Artificial Sequence
  Synthetic
DEDRIRKELEKAHKETREESEKLNRDVERVLREVRKASKDLNDKFEEELRKLREKVERDL

SEQ ID NO: 22584 - protein, 56 aa, Artificial Sequence
  Synthetic
RDKVEEDLRRSRKELEDYARDLEDAIRRIEDRLRRYARKLEEDIKRLARKLEERER

SEQ ID NO: 22585 - protein, 61 aa, Artificial Sequence
  Synthetic
SRTERVKEELKRLVEEYKKRSDDSRRRNEKLTRDYREDSRRVEEELKRIKEDVERELRRRD

SEQ ID NO: 22586 - protein, 59 aa, Artificial Sequence
  Synthetic
DEEAKKDLKRVRDALDRLTKRNEEKDKENEDRLRKMLRENRERLKEVRERAKRIKEELK

SEQ ID NO: 22587 - protein, 63 aa, Artificial Sequence
  Synthetic
KEKEEIRKALKELLDDLERTLERLKREYDKLRKDLEDTDERIAREHKKIADDLDRTLKEARKK

SEQ ID NO: 22588 - protein, 55 aa, Artificial Sequence
  Synthetic
ERVLEEVKREVDRIKEELRRTLEENRRRIEEIKKRLEDILRESRERARELKEKLR

SEQ ID NO: 22589 - protein, 56 aa, Artificial Sequence
  Synthetic
SEAETILRRVRRRVEEILDRIRRKLEESKREVEKHRRDVKKVLDDVRRTVKRIKER

SEQ ID NO: 22590 - protein, 55 aa, Artificial Sequence
  Synthetic
EEVDTRLKEISKELEETLRRVTEEHKRLNRELEEVDRRAEKEVRKILKELRDTTK

SEQ ID NO: 22591 - protein, 61 aa, Artificial Sequence
  Synthetic
SKEEELREVLRRIERELERVNEELREENKRIDKELEEVNRELEERNKRINDTVEDLVRERG

SEQ ID NO: 22592 - protein, 59 aa, Artificial Sequence
  Synthetic
REELRKIAEKLKKNLEEHKKRVREYLKRLEENLKRHRERVEKYARDLKRDLDRLRERLR

SEQ ID NO: 22593 - protein, 60 aa, Artificial Sequence
  Synthetic
SEEEKLEKKAREIEEALRRVNEELKRRNKEIDERLEEVNRRLEKDLKKIEEDARKLVKDK

SEQ ID NO: 22594 - protein, 59 aa, Artificial Sequence
  Synthetic
EDELREIIERLERNLERHKRRVDKYLRDLEKNMRDHKRKVDEVVKTLEETLRRLEEEVR

SEQ ID NO: 22595 - protein, 60 aa, Artificial Sequence
  Synthetic
SEEERLREKVKRVEDDLRRLNEEYKEKHKRSEERNKKLLKDLKEVHDRVKKAVEDILRDT

SEQ ID NO: 22596 - protein, 56 aa, Artificial Sequence
  Synthetic
EEEVEERIRRALKESREEIDRLERRNEEEDKKSEETVRRMMERNDRVLKEVEERAR

SEQ ID NO: 22597 - protein, 60 aa, Artificial Sequence
  Synthetic
REEEELRRLVKTVEDEVEKLLRRYRDESEKVKRTLEELNKDLERKHKEVLDRIRDILRKV

SEQ ID NO: 22598 - protein, 56 aa, Artificial Sequence
  Synthetic
REDVERELEETLRDVARKIERLLEKNKRDLDRSKKRVEEMVRRNEKALKDVEDEIR

SEQ ID NO: 22599 - protein, 60 aa, Artificial Sequence
  Synthetic
SEREDLKRTVDEVKKRLEELIDDYRKTSEEVERRLEELLRRLREDHKRVAETIDDILRRV

SEQ ID NO: 22600 - protein, 56 aa, Artificial Sequence
  Synthetic
TEEVKERIRRDLERVKRKIEELKKKNEEDLRRADKKVKDMLEENRRTLEKAKRKAD

SEQ ID NO: 22601 - protein, 60 aa, Artificial Sequence
  Synthetic
SKEDEARKEIKRIEDEIERLRKELEDAHRKLREDLKRLRDENKKVLEDIKRRLKELEKDT

SEQ ID NO: 22602 - protein, 55 aa, Artificial Sequence
  Synthetic
DRVRKKLEDELRRLKRTVDELKKRNEKALRDVKRDSERHKEELRRALRKAEEDAR

SEQ ID NO: 22603 - protein, 61 aa, Artificial Sequence
  Synthetic
SLKEELDKAIRELKERHKRINEDLERVVRESRKNHEDINRRLKKLLEELEKRVEEIVRREQ

SEQ ID NO: 22604 - protein, 59 aa, Artificial Sequence
  Synthetic
DRVIREIKKRLEDLLRRTEERAKEVKDENRKRNEDTREEVRRVEEELKELLRRIEERER

SEQ ID NO: 22605 - protein, 59 aa, Artificial Sequence
  Synthetic
DEVREIIRELKERIDKIAKEIDDENREHRERLKEIAREVKELIKENRKELKRIADERKD

SEQ ID NO: 22606 - protein, 59 aa, Artificial Sequence
  Synthetic
EEIRKRLDEATKRAEDELRKLKEKNKEVLKELDDRLRKLEDEHRRVREEVDKRLDELRK

SEQ ID NO: 22607 - protein, 60 aa, Artificial Sequence
  Synthetic
DEREKIEKRIRELLKEDKEHTRRNEEKIRRLLDTNRRLLEEIAKKIEEIARELKERKKEN

SEQ ID NO: 22608 - protein, 55 aa, Artificial Sequence
  Synthetic
EEIRKLVEDYRREHEKLKRRNDELLERYRRAHEEIKKRIDELVERLEEILRKLAE

SEQ ID NO: 22609 - protein, 60 aa, Artificial Sequence
  Synthetic
SEKETIEKRIRDKLKDDEDHTKRNEERIRRALKEDEDRLRKIEEEIRRTLEELEREKRSN

SEQ ID NO: 22610 - protein, 55 aa, Artificial Sequence
  Synthetic
EDIERLEERYRREHERLKRRNEDLSREYEERHERLKREIDKLEEDLKRETERAAR

SEQ ID NO: 22611 - protein, 60 aa, Artificial Sequence
  Synthetic
SEKEKIKKEIEDARREDEKHTEKNKRDIERDERRDEETLKEIEERIRRTLRELEKDRESN

SEQ ID NO: 22612 - protein, 55 aa, Artificial Sequence
  Synthetic
EDIERLEREYEKDHKRLKDENDDLTEKYRRRHREIDERIKDLERELDRRIKEIDR

SEQ ID NO: 22613 - protein, 61 aa, Artificial Sequence
  Synthetic
DVRDRVRELRRRLEEETKKVDDENRKIHEELKRVADESRKNNERLNRELRKEIRRVEKDLG

SEQ ID NO: 22614 - protein, 59 aa, Artificial Sequence
  Synthetic
EEALRRLEETLKEVKDELKTELDDSRREVEEVKRSNKEKNERSERRLKEVRDRLREERK

SEQ ID NO: 22615 - protein, 59 aa, Artificial Sequence
  Synthetic
SLEDSAREIEKRLRDLHRRYREDHERIREDLERLKTEYEKAHRDIKRELDRLREELERA

SEQ ID NO: 22616 - protein, 60 aa, Artificial Sequence
  Synthetic
EKEMLDRLEEHVDRNEKDIKKALDENRKRLDDIRRKIKKALDENREELKRIERRIRELKK

SEQ ID NO: 22617 - protein, 60 aa, Artificial Sequence
  Synthetic
SAEETTEDLKRRLKELDEKVKEVLKRNEDRVRELEEDVRRNLKKNEDDAREVEERLKTSG

SEQ ID NO: 22618 - protein, 59 aa, Artificial Sequence
  Synthetic
EELLKEVEDRVREIIKRIEEKLKRLNDRTREFIERIRRELRKVNEETKKMIKELKEEED

SEQ ID NO: 22619 - protein, 60 aa, Artificial Sequence
  Synthetic
SKAEKVLEKAREVVETIKRLVEEVLRHSEDVVRRITDLVRRLLEENERVVREIKRLADEG

SEQ ID NO: 22620 - protein, 55 aa, Artificial Sequence
  Synthetic
ERVIKKIEDLLKKVDDEAKKMLEEVERLNKEVNDRLKRVLEEAERLHEEVNRRVK

SEQ ID NO: 22621 - protein, 57 aa, Artificial Sequence
  Synthetic
KELEDVIEEVKKLLKTVNEESRRVAEEVRKLIREVSEELTEVIRRVERLVEEVATRV

SEQ ID NO: 22622 - protein, 56 aa, Artificial Sequence
  Synthetic
LDTVLRRAEDIVRKNRKLAEEVLRRVKKIVEENRKIAKEVLDDVRKLVEDVLRRAT

SEQ ID NO: 22623 - protein, 57 aa, Artificial Sequence
  Synthetic
EELERVIEEVRKLVEEAEKKSREVIKTVKELMDDVNRKSKKVLDDVRRLIEKVRREV

SEQ ID NO: 22624 - protein, 56 aa, Artificial Sequence
  Synthetic
ADDALRRVKEIVERNEEVVKELLKRAEDIVRTNEKLVKDVLDTVRKLVKKVKDDED

SEQ ID NO: 22625 - protein, 59 aa, Artificial Sequence
  Synthetic
SEAEDALRKAKRLADEDRKAAKRALEEAKKSAEEVKKAAKRALEEAKRIAEDVKRAADE

SEQ ID NO: 22626 - protein, 55 aa, Artificial Sequence
  Synthetic
EEAAREAKKLAKDAADVSRKAAKDAKDLSKEAADVARKAAEDARRLAEEAARKAK

SEQ ID NO: 22627 - protein, 60 aa, Artificial Sequence
  Synthetic
SDAEDVVRKVKRLVDELRRHSKELLKEVEDLVRDLVRHSEEVVKRVEDLVRRLEELVRRG

SEQ ID NO: 22628 - protein, 59 aa, Artificial Sequence
  Synthetic
EEVRRVLREIREVLKKVAEDSRKVNEDIRRVLEEAKKTSDKVNTDSEEVLRTVARRFED

SEQ ID NO: 22629 - protein, 60 aa, Artificial Sequence
  Synthetic
SRAERLLEDVRRLLEESLRNSERVLEEVRKLIEENLRHSRKVVDEVRRLLEEVLRVVERG

SEQ ID NO: 22630 - protein, 59 aa, Artificial Sequence
  Synthetic
EDVRRVLEAIKEDLKRVEDANREINRRSEELLREAEKRSRDIDKESRDLVRKVKKDLEK

SEQ ID NO: 22631 - protein, 60 aa, Artificial Sequence
  Synthetic
SRAEEVLKDVKRLVDENRRHSERVVEEVRKLVTENKRHSERVVEEVRRLVEELERARRRG

SEQ ID NO: 22632 - protein, 59 aa, Artificial Sequence
  Synthetic
KDVRKVLKDIREVLERVEEDSERVNRESKKVLDDVKKESDEADDESRRVLEEVDRKARK

SEQ ID NO: 22633 - protein, 60 aa, Artificial Sequence
  Synthetic
DRVEELLKTVEKLVRDNEKHSRDVVKEVRRLAEENERHSERVVREVRRLVKELEDMKRRG

SEQ ID NO: 22634 - protein, 59 aa, Artificial Sequence
  Synthetic
REVREVLKRIEEILKDVKRKSEEVNRESERVLREVEKRSEDADRESKKVLDDVKEKARR

SEQ ID NO: 22635 - protein, 60 aa, Artificial Sequence
  Synthetic
SEEEVLKEIDEVSRDLERKNKTINEEIKKVSDRVAEEVRRVLEDIKRTSKDAVDDVRTRG

SEQ ID NO: 22636 - protein, 56 aa, Artificial Sequence
  Synthetic
LEKVVREVEESVKESEERSRRLLEEVRRSVKKLEEDVTRLLEENKKSVDDIKERAR

SEQ ID NO: 22637 - protein, 60 aa, Artificial Sequence
  Synthetic
REEEVLEEIRRVVEEVRRENERINKEIRERSEDLRRKVKRILEKAKKVLDDVDERAKREG

SEQ ID NO: 22638 - protein, 56 aa, Artificial Sequence
  Synthetic
VDEVLKEVEDLVRESVRLSEDLLREVRESVERLVDEARKLVREIERLVKEAVDTVR

SEQ ID NO: 22639 - protein, 60 aa, Artificial Sequence
  Synthetic
KEEEVLKEAEEVSRRAEEKNRRINDEVRRVVRRVEETVTRVLEDVERTSKEAKERVERAG

SEQ ID NO: 22640 - protein, 56 aa, Artificial Sequence
  Synthetic
LDTVVEEIKDSVRKSVERSRELLERVERIVTELEKRVDELVRENEDSVRRIDERVR

SEQ ID NO: 22641 - protein, 60 aa, Artificial Sequence
  Synthetic
SEAEKIVEEAKRLADKARELAERSVRHSEKLARDSEKAAREAVKEAKDLADKARDLAAKR

SEQ ID NO: 22642 - protein, 56 aa, Artificial Sequence
  Synthetic
KEALDTARKILRDAEEAAKEAHKEANRLNKEAEEAAKRAADEARKILKKAEEDARR

SEQ ID NO: 22643 - protein, 60 aa, Artificial Sequence
  Synthetic
DDLEEIVKRVRRIVEEIRRLVEELVRRDKRIVDEIKRLLEEDKRKVDEIVKEIEEVVRRG

SEQ ID NO: 22644 - protein, 59 aa, Artificial Sequence
  Synthetic
EEVRRVLKEVKDILKTVRDEVEEANEDAKRLNEEVREEAERVLRDTKRILDEVRKEADK

SEQ ID NO: 22645 - protein, 59 aa, Artificial Sequence
  Synthetic
REKEVLEEVRDIVRRASERSKEALDESREILKTVDDEVRRVLEDSRRLLEEVRKRVEDN

SEQ ID NO: 22646 - protein, 56 aa, Artificial Sequence
  Synthetic
AREIVERVRRLVDTSRRLVEEDVRRVREVVKELRKLLREDVKRVRDVVEELAKEAT

SEQ ID NO: 22647 - protein, 57 aa, Artificial Sequence
  Synthetic
SEMEDAKRKIEDLVRRVKDSLRDAERRIREVVERVERSLKEVEDRSRELLEDVKREG

SEQ ID NO: 22648 - protein, 59 aa, Artificial Sequence
  Synthetic
DESVRDAVREVEDLIRRLTEDNKRLVEEVKRLVDRASEENKKLNDTSKKVVDEIREREK

SEQ ID NO: 22649 - protein, 57 aa, Artificial Sequence
  Synthetic
EELERVKEEIDKLVKEVRRSLKDVERRSAELLKEVEKSLEEVERESKKVLDEVRKAG

SEQ ID NO: 22650 - protein, 59 aa, Artificial Sequence
  Synthetic
DKAVKTLLEDVRRLVREATEDNKRVNDESRELVERASRDNRRVNKESRDIVRRLEERTK

SEQ ID NO: 22651 - protein, 57 aa, Artificial Sequence
  Synthetic
SELEEVERRVEKVVKEVRDSLKKVKEDIEKVLRESHKRLRDVEREVRRVLEKVRRRG

SEQ ID NO: 22652 - protein, 59 aa, Artificial Sequence
  Synthetic
DKTVRDVLRRVRKLVEDATRANEKALDDVRKLVEKSRKLVEDVLERVRRLVKELEERTT

SEQ ID NO: 22653 - protein, 59 aa, Artificial Sequence
  Synthetic
DEVEDVVRKVRDLVRRVREAVRRLLEENRDLVRKLIEDSERLVREVEKLIKEVEDTVKD

SEQ ID NO: 22654 - protein, 59 aa, Artificial Sequence
  Synthetic
REELERVIKEIKDVVREVTKVVEKVIREAEKLNEDVNRRSEEVNKRIKKLVEDVARRVE

SEQ ID NO: 22655 - protein, 56 aa, Artificial Sequence
  Synthetic
DEAEEVKKLIDKVLREVEEVVRRVNKRDKDLLREVEKVVRDVNREDKRVLEEVERS

SEQ ID NO: 22656 - protein, 55 aa, Artificial Sequence
  Synthetic
EEIVREIEKVAEDIMRRNEELVKESEDVVRKIVRDNERLAEDSKRVVEEAVRREK

SEQ ID NO: 22657 - protein, 61 aa, Artificial Sequence
  Synthetic
SAIDRVRKTLEKLVERLERVLEESSKAVEDVKEKVERLLRELRERTKRIVDEVEDMVRKAN

SEQ ID NO: 22658 - protein, 59 aa, Artificial Sequence
  Synthetic
EEELDRLVKKVEDLVRRLEELARKSLKDIKKLLKDIEDRLRKSVEKSRRLAEEIKERLR

SEQ ID NO: 22659 - protein, 60 aa, Artificial Sequence
  Synthetic
DKADEAVKRVKDLIDDLKRRIDEVVKRSREVVRDIEKHAEDVVKESRRVVDEIKKLVTRG

SEQ ID NO: 22660 - protein, 55 aa, Artificial Sequence
  Synthetic
EEVEERVREVLRRVEKRVKEVNEESERTIRELERVSRRVNEESRRSIEEAKRAAD

SEQ ID NO: 22661 - protein, 61 aa, Artificial Sequence
  Synthetic
DAVERAKEESKRVLEDAERVVRRVEEEVRKMERKAEESLKDVRRKSEEVIRKVEEVVRRKG

SEQ ID NO: 22662 - protein, 59 aa, Artificial Sequence
  Synthetic
DKEVREVVEDSRRSVRRVEELVEKVVRDVKKLIEDHERRNRESVRESERSIKELEEKVR

SEQ ID NO: 22663 - protein, 59 aa, Artificial Sequence
  Synthetic
DDLERVLREVKRLVEENEKKVRRIVEESRELVERNKELLRRVVEEVRRLVKEVRDILRN

SEQ ID NO: 22664 - protein, 59 aa, Artificial Sequence
  Synthetic
EDKLREVRERIKRLLDRSHEAVRRASEKSKRSLEESHRAVREVEKRLKELLEDVREDVR

SEQ ID NO: 22665 - protein, 59 aa, Artificial Sequence
  Synthetic
DRLEEVVERVERLVRENVKRLEKVAEENRELVERNKRRLEEIVRRVRELIERAKRIVRD

SEQ ID NO: 22666 - protein, 59 aa, Artificial Sequence
  Synthetic
EDKLRDVERRAKELLEESHRVIRTVEERSKTVLADSHRVIEDVRRRLEELLREVAEEVR

SEQ ID NO: 22667 - protein, 60 aa, Artificial Sequence
  Synthetic
DEADEVVKEVEDRVRKLVRRLEESAKKSKELVERILKRVEDSVRRSEELVERIKREVERR

SEQ ID NO: 22668 - protein, 55 aa, Artificial Sequence
  Synthetic
EKVEEMLRRVLEEVRRAVRKSSEDNKRSVEEVKRVLEKAEEDNRRVVEEVDRELK

SEQ ID NO: 22669 - protein, 60 aa, Artificial Sequence
  Synthetic
SKLEEVEKMVRKVIEDSRRVNEEVNRRSEEVVRELEKVHREVNDASRRVVEKARRVLKEG

SEQ ID NO: 22670 - protein, 58 aa, Artificial Sequence
  Synthetic
KEADEVVERAERISEENKRRVEDVARKSKELVEDVRRHSEEVVRRVEELVKEVEERVR

SEQ ID NO: 22671 - protein, 60 aa, Artificial Sequence
  Synthetic
SLLEDVKRTVREVVRESRRVHKEVNDDSRRVLKRSDEAHERVNRDSRRVIERIREVLSRG

SEQ ID NO: 22672 - protein, 58 aa, Artificial Sequence
  Synthetic
EEVRELAEDARRISEDNRRNSKRVVDRVREISKENEDNSRRVVDRVRKLAEEVEREVR

SEQ ID NO: 22673 - protein, 60 aa, Artificial Sequence
  Synthetic
DDLERVKETVKKVIKRSRDSTKKVADTLREVVRESERVHREVNETSRRVEEEAKRVASRG

SEQ ID NO: 22674 - protein, 58 aa, Artificial Sequence
  Synthetic
EEVDKLADRARRLVAKSEEDNKRVMKEVTDISKENEDNSRRVVDEVRKLVEEVRRRLE

SEQ ID NO: 22675 - protein, 60 aa, Artificial Sequence
  Synthetic
DKVERVVEEIRDLMRRVEELIKKAADDNRKLVKEVEDLIRDAVRDSERLVAEVEKLLTKE

SEQ ID NO: 22676 - protein, 55 aa, Artificial Sequence
  Synthetic
DEVRKEVKRVIKAVEKVIEDVERTSEEARRRVEKVIKEVEEKNREVIKRVEDRIR

SEQ ID NO: 22677 - protein, 60 aa, Artificial Sequence
  Synthetic
SEADKLVEEVKDVVREDKRRVKEIVETVRELVRRSRETVRRIVETVEEVVRRLLELLRKG

SEQ ID NO: 22678 - protein, 55 aa, Artificial Sequence
  Synthetic
EKVEEVLRRVKRESEKVIEDVERELKRVEDDDRRVIEEVKKRLKRVLERVRTESK

SEQ ID NO: 22679 - protein, 59 aa, Artificial Sequence
  Synthetic
READELVDRVKKVVEEDKRLSKELVDEIERVVDELEKVSRELVERVRDLVRRLLEVAAK

SEQ ID NO: 22680 - protein, 55 aa, Artificial Sequence
  Synthetic
DKVEKVLKRVEEESREASERNERVIERVERRVDEASKRNEDEIDKVRKEVERVAT

SEQ ID NO: 22681 - protein, 59 aa, Artificial Sequence
  Synthetic
EEVKELVERVRRVVDDLRKKLEKIVEEVRDVVRKDEERSRKLVEDVKDLVRKILEVLRK

SEQ ID NO: 22682 - protein, 55 aa, Artificial Sequence
  Synthetic
DDLRRVLKEVDEEVRKVIEDVARVLEEVKRRSDRASRENEEVIKRVTEEVKRVVK

SEQ ID NO: 22683 - protein, 60 aa, Artificial Sequence
  Synthetic
DRVEKLVEEVKRHVTEVLKTVEDLARRIRDHVRKVEDTSRELVKEIKRLVEEILDRVRKK

SEQ ID NO: 22684 - protein, 59 aa, Artificial Sequence
  Synthetic
EDVVRELRRVLRESNEKLKEVVDRLRKVLEESTKRVEDASRRVERVLEKVEEDVKREAT

SEQ ID NO: 22685 - protein, 60 aa, Artificial Sequence
  Synthetic
SEVEELKERIREIVERIEETVRRLAKRVEDHVREVEKDSKRLADEIRDFVRRITDEVRKK

SEQ ID NO: 22686 - protein, 59 aa, Artificial Sequence
  Synthetic
KRLVDKLRKVLEEVREEVERVVRELEEVLRRSTKRVEDASRELERVLKEVKETLEREVR

SEQ ID NO: 22687 - protein, 60 aa, Artificial Sequence
  Synthetic
DRVEALVDEVKRHVTELLKTAERLADEVREHVDDVRKKSKELVDEIRRVVEKILDEVRKK

SEQ ID NO: 22688 - protein, 59 aa, Artificial Sequence
  Synthetic
EEVVRELRRVLRESNEELKKVVTELEERLKDSNEEVKKASAEVRKVLEEVRADVDREVK

SEQ ID NO: 22689 - protein, 57 aa, Artificial Sequence
  Synthetic
SLVEKLRRVLEEVRRTSEKVIRDVKEVNKRSEDKTREIVRRLEEVNKESKERLDRAG

SEQ ID NO: 22690 - protein, 59 aa, Artificial Sequence
  Synthetic
KELAEKLAREVKRLVDESKKNMDKSVEDSRRLVRESEENVRKSVEDSRRLVKRAVEETK

SEQ ID NO: 22691 - protein, 60 aa, Artificial Sequence
  Synthetic
RVDEDLRRVLKEVKERNEEVVRRSKEETDRVEEDIERVIRDSERVSEEVKRRVDKAKKDV

SEQ ID NO: 22692 - protein, 59 aa, Artificial Sequence
  Synthetic
EELAKEVVKRVRELVDRSRRLMTESVRKVRELVEDIRRRVRESVEKLRRLVEEIERRIR

SEQ ID NO: 22693 - protein, 60 aa, Artificial Sequence
  Synthetic
KEVEKLVKDVERMVEESLKENERLVKKSDELVKESEKRNKELAERSRRLVKEITDRLAEE

SEQ ID NO: 22694 - protein, 59 aa, Artificial Sequence
  Synthetic
EDVLRDLRRVVEEVTEKIKEVNRRSEEANKRSKDRIEEVNRRSEKVNEDVEREIERALR

SEQ ID NO: 22695 - protein, 60 aa, Artificial Sequence
  Synthetic
DELEKAVERVKDIVRKSLELLKRLADRVRDIVREILDEVRRNVEEVRRIVKEIVEEVRRR

SEQ ID NO: 22696 - protein, 59 aa, Artificial Sequence
  Synthetic
EEALKRLERVVREVAEESDRANKELDRVVEEVKERVERVLRESNKVVKEVEDRVREETR

SEQ ID NO: 22697 - protein, 57 aa, Artificial Sequence
  Synthetic
SVKETVEEEVRRVSDEDRRINRDVERVSEESNRRLDKVHKELEEVVKEVLKELDDTG

SEQ ID NO: 22698 - protein, 59 aa, Artificial Sequence
  Synthetic
EETARRVVEEARRIVAESKELVKEVVRRSDELVRDVEKHSRDVAKTVRKIVTDVARRTR

SEQ ID NO: 22699 - protein, 57 aa, Artificial Sequence
  Synthetic
SAEETLEKVIRDVEEEDKKAHEDSRRVIETVKEEIDRVHKDSKRKIDEVKERIRREV

SEQ ID NO: 22700 - protein, 60 aa, Artificial Sequence
  Synthetic
LEERVRRIVKEVREIVKRSKERSDEIVKEVKRIVKEALDLSREIVERVERIVREVVERAR

SEQ ID NO: 22701 - protein, 57 aa, Artificial Sequence
  Synthetic
EADERLRKRLKEVNERDKKAHEDSKRAIDRVREEDKRVLDTVREEIKRVKDEIRRAL

SEQ ID NO: 22702 - protein, 60 aa, Artificial Sequence
  Synthetic
LERLVREVVRENEELVTRSEELSRRIVEEVKRIVDESRKRAKEIVDEVRKRVKELVDTDK

SEQ ID NO: 22703 - protein, 57 aa, Artificial Sequence
  Synthetic
DVREKLEKVLREVERRVEKASRESKETLDRVRKRLKDVSDESKRELERVKKRVDDAD

SEQ ID NO: 22704 - protein, 59 aa, Artificial Sequence
  Synthetic
KKVIEELVEEVRRLVTEHERLSRELVDRVEKLVARHEELSKKLVTDAERIVKEVEERAK

SEQ ID NO: 22705 - protein, 57 aa, Artificial Sequence
  Synthetic
SALERLREVLERVLRRVKKVTDDARRVNERVNRKVDRVSEDSERELRRVLKRVREAS

SEQ ID NO: 22706 - protein, 59 aa, Artificial Sequence
  Synthetic
EEVLRELVERAKKLVDDHLELVERLVRESEKLVEDHLRRSKKIVEDVKRIVEDVERRVK

SEQ ID NO: 22707 - protein, 60 aa, Artificial Sequence
  Synthetic
DEVDKARKEVDRVVKESRKLVEKNVREVEEVVKTVEKLVEDVIRRVEDVVREVKELVTRG

SEQ ID NO: 22708 - protein, 59 aa, Artificial Sequence
  Synthetic
EELLDRVRKVVEDVSRKSKKALDESHEVVKRVKDRADEVLDKVRRAVEEVERRIETEAR

SEQ ID NO: 22709 - protein, 60 aa, Artificial Sequence
  Synthetic
DEVEKAVKEVERVVREVKELVDRNIDEVRKVVEDSKRLIDELVEDAKRVVKRVKELRDRG

SEQ ID NO: 22710 - protein, 59 aa, Artificial Sequence
  Synthetic
EELLDRVRRVVEEVKKEADRLLEESHRVVREVSERSKRALEEVKRVVDEVTERIKKDKD

SEQ ID NO: 22711 - protein, 57 aa, Artificial Sequence
  Synthetic
STKEKLDDVLRRVEEKAREVVEDNRRADRDVHRKARKVVEELRRVDEEVHETVKRVD

SEQ ID NO: 22712 - protein, 56 aa, Artificial Sequence
  Synthetic
VDEVVDRLRRLVEEVLRHSKKNSRESDEMVRRVTEEVREVVKESKERVDDVLKRVE

SEQ ID NO: 22713 - protein, 60 aa, Artificial Sequence
  Synthetic
KKVEEIMERLRRVAKEIKERVDRLVEKNRKSAKDLLDTIEDIVRKNRDLAEKIKDLARRR

SEQ ID NO: 22714 - protein, 56 aa, Artificial Sequence
  Synthetic
KEKLRRVLREVEEVVRRVKKKLDDSVRELREIIRRAERELREVDEEVRKVVEDVKR

SEQ ID NO: 22715 - protein, 59 aa, Artificial Sequence
  Synthetic
RVREELKKVEEEVREVVRRAKEKTRRVLEEMRKVVKDVDDESKRVVDEVKKVLEEVRAR

SEQ ID NO: 22716 - protein, 59 aa, Artificial Sequence
  Synthetic
EEVVKKVVDDIRKLAKDMDDHSKEVVDRIREVARRIEELNRELVRDLKDEVRRVKEKAK

SEQ ID NO: 22717 - protein, 59 aa, Artificial Sequence
  Synthetic
SVRETLKTVEEEVKRVIDRARKRDERVVREVERVLRDAMRKDEDVNRDVERVLRDVVRR

SEQ ID NO: 22718 - protein, 59 aa, Artificial Sequence
  Synthetic
KDVFKRVVEELRRLVKRVEELVTRTVEEIDRIAKEVTRHSEETVRRLKKLVKTVTDEAN

SEQ ID NO: 22719 - protein, 59 aa, Artificial Sequence
  Synthetic
SSVREVVKEARDIAKENLERVKKTVKENRDLARKVAEDVKKSVEELRKLAEDVEEIARK

SEQ ID NO: 22720 - protein, 59 aa, Artificial Sequence
  Synthetic
EELEKELRTVVREVEEVLRRSEEDDRRVHKEAEDVIKKVEEDDKEVVDRVKKVIRDVRT

SEQ ID NO: 22721 - protein, 59 aa, Artificial Sequence
  Synthetic
SEVEKIVKEAEDLVREVKRRVEDTVRKNRELADRVRKEVDKSVRELRELVKRVLDIAKD

SEQ ID NO: 22722 - protein, 59 aa, Artificial Sequence
  Synthetic
EELRRELERVIKKVEEVIRKAEEDDRTVHRELNKIIKDVEDKDRTVVEEVERVIEEAER

SEQ ID NO: 22723 - protein, 59 aa, Artificial Sequence
  Synthetic
SEVDEVVERARRIAKENLDRVKKIVRENRELVEKVRKDVEDSVRTLKKLVDDVTEIARK

SEQ ID NO: 22724 - protein, 59 aa, Artificial Sequence
  Synthetic
DDMRRKLETVVKEVEDILRRSREEIRTVNEEVEKVIEEAEREDERVVREVEEVIKRVEK

SEQ ID NO: 22725 - protein, 59 aa, Artificial Sequence
  Synthetic
SSVEDVVRKMRKIVEDNKREVEKIVRENRKMAKDNEDLVKESVKDLKRLAKELEDLAKD

SEQ ID NO: 22726 - protein, 59 aa, Artificial Sequence
  Synthetic
EDLERTLRTVVKEVKEVLDRSRDLVRRVNEEVKRVLDRSREEDERVVREVEEVIRRVET

SEQ ID NO: 22727 - protein, 59 aa, Artificial Sequence
  Synthetic
REVDEIVDRLRRIAKENKDRVRELVERNRKLAEEVRRRVEESVKRLRDLVRTIEELARR

SEQ ID NO: 22728 - protein, 59 aa, Artificial Sequence
  Synthetic
EDLERKIREVVREAEEVLRESKREMDTVNKEVREVIEDVRKRDEDVIREVEKVIREVEQ

SEQ ID NO: 22729 - protein, 59 aa, Artificial Sequence
  Synthetic
SEVDEIVKEIREIARKNKEDVRRTVEDLRRLVKEVEKRVEDSVRTMRDLVRRLEETARR

SEQ ID NO: 22730 - protein, 59 aa, Artificial Sequence
  Synthetic
EELERKLKTVIDEAEKVLRESEEDDRRVVEEVERVIKKVEEEDRKAVREVEKVLEDVRK

SEQ ID NO: 22731 - protein, 60 aa, Artificial Sequence
  Synthetic
REVDELLKRIKEVADDIKRLSDENVKEIEKLAREVEKLVRDVVRENEEVAKEIEDLARRR

SEQ ID NO: 22732 - protein, 56 aa, Artificial Sequence
  Synthetic
KKKLRDVLRELEKVVRDVAKEDEDANRRLKEVAERVKREIDEVDKKLKKVLDDVRK

SEQ ID NO: 22733 - protein, 60 aa, Artificial Sequence
  Synthetic
REEEKLRKVLEDAKKVSKEVNEEDDRVNKEVEDVLREVKKEIDEVLKRATETVERVKREN

SEQ ID NO: 22734 - protein, 56 aa, Artificial Sequence
  Synthetic
VDEIVKRIKELVDRSRKLSEENVRRLKKIVKRVKERVKELLDRIKEMAKEIEDRVR

SEQ ID NO: 22735 - protein, 60 aa, Artificial Sequence
  Synthetic
DEEKKLKEVLDRATKVVKDVAEELDRVLEDVERVSRDVNRRDEKVNRDADRVLREVKDEN

SEQ ID NO: 22736 - protein, 56 aa, Artificial Sequence
  Synthetic
VEEIVRRIEEVAKTLREIVRRVLEELKEVVKESERLSRENVRRIEKLAEEIRRRVK

SEQ ID NO: 22737 - protein, 60 aa, Artificial Sequence
  Synthetic
DEDEKLRKVLEELRRVVEEVKRRSDKALEDAERVLRRVKKEDRDANKKAEDELRRVIDEN

SEQ ID NO: 22738 - protein, 56 aa, Artificial Sequence
  Synthetic
VDEILKRIEELMKEIRKLVKEDVDRIRDLVRRIDEESKENVKEIERVADEIRERIR

SEQ ID NO: 22739 - protein, 60 aa, Artificial Sequence
  Synthetic
KEVEDVLREVEKVVEKIKRDVEKIVKDSKELAKRVEELVKESEDRSKEIVDRVEKLRREG

SEQ ID NO: 22740 - protein, 56 aa, Artificial Sequence
  Synthetic
EEKVEKVLRKVRDVVRRVKEKVEEVHRRSREMLKRVEDRDREAHERSRKVAEDVKR

SEQ ID NO: 22741 - protein, 60 aa, Artificial Sequence
  Synthetic
SEVDEVLETIERIVREVKKLVKRSVEESERLVDEVEKLVEKSVREIKEIVDRIRDMKTKG

SEQ ID NO: 22742 - protein, 55 aa, Artificial Sequence
  Synthetic
EKVERVLEEARRVIEEVEREDDDAHRKSKEVLKRVLEKDRKALEDAKKVVEEVKR

SEQ ID NO: 22743 - protein, 59 aa, Artificial Sequence
  Synthetic
KEVEDLERRNKELVERVDKLSRENVERNKKLAKELKEISEENVRRNRKLAEELKEVADR

SEQ ID NO: 22744 - protein, 59 aa, Artificial Sequence
  Synthetic
EDLRRRVKKSHDEVERELRRVDREDETSHEELRRVLEKVKREDRKSHEEVKRRLDEVRR

SEQ ID NO: 22745 - protein, 59 aa, Artificial Sequence
  Synthetic
SEVDEIVKRNDDLAKEVKRLSTENVKRNKELADRVKRLSTENVKTNEKLAKDLERVVRR

SEQ ID NO: 22746 - protein, 59 aa, Artificial Sequence
  Synthetic
ERLRRKVEKSHRDLREVLERVRREDERSHEEANKVLEDVKREDEKSHRDVKKRLDDVRR

SEQ ID NO: 22747 - protein, 60 aa, Artificial Sequence
  Synthetic
SEVDRLLEKLEELVRKVRRDVEENVKKNDELAKEVERLSKRNVERNEELAKEIEDLARRG

SEQ ID NO: 22748 - protein, 59 aa, Artificial Sequence
  Synthetic
EELKEKVKRVMEKVKRVLDRVREEDEKSHRKADRVLREVEKRDRDSHERLRKVLDDVRR

SEQ ID NO: 22749 - protein, 59 aa, Artificial Sequence
  Synthetic
DEVREIVERNERLAREDKKIAEENVRRNEDLVRRLRELSRKNVEDNRRLAKELEEVAAR

SEQ ID NO: 22750 - protein, 59 aa, Artificial Sequence
  Synthetic
EELKKRVKDSHDKLREVSKRSEELDRKSHEDLKEVLKEVRERDDRSHEELRRVLEEVKR

SEQ ID NO: 22751 - protein, 60 aa, Artificial Sequence
  Synthetic
DEVERILERIDELVKRVKELSRRNVERNKELVERVDRLVKDNVDRNRRLAEEVDRLKKEG

SEQ ID NO: 22752 - protein, 59 aa, Artificial Sequence
  Synthetic
EELTKKVEKVVKDAKKTLEEVKREDEDSHKKANDVLRRVRELDKRSHDELKRVLDEVER

SEQ ID NO: 22753 - protein, 59 aa, Artificial Sequence
  Synthetic
SEVEDVLKKLDDIAKEVTERVKRVLDRNEEIVDEVEKLVEEVVRRNKEIVKEVKRLKDE

SEQ ID NO: 22754 - protein, 58 aa, Artificial Sequence
  Synthetic
DLEREVRRVIREVEKVIDDVRREVERSIRKSEKDIREVEKRVEDVNREVEEAIRRVRT

SEQ ID NO: 22755 - protein, 60 aa, Artificial Sequence
  Synthetic
REVEELVKKLKELAERSLTAVERIVEENERLLKRLEDESKRNVDDIERLARELLRRVEEE

SEQ ID NO: 22756 - protein, 59 aa, Artificial Sequence
  Synthetic
ERVERILTKVIEDLERVDKAAHDILREVNERLREVMERVEKTNRTVNRRLEEVLKEIER

SEQ ID NO: 22757 - protein, 59 aa, Artificial Sequence
  Synthetic
DEVEEIAREMREIVDRVLKLSEKTVRENRESVERLLRLSEETVRRIRDLVRRLEELARD

SEQ ID NO: 22758 - protein, 59 aa, Artificial Sequence
  Synthetic
EEMKEKVERAVEEVKRVLDRVRETDKRVNEEVRKVNEEAERIDEKVVREAREVLKRVRD

SEQ ID NO: 22759 - protein, 60 aa, Artificial Sequence
  Synthetic
RVAERLEDVLRELDRTLKDVARKLEEANRDNKRVLEEVAEILKRVLDDLRRVLDEVAKRL

SEQ ID NO: 22760 - protein, 59 aa, Artificial Sequence
  Synthetic
EKVVDDIVKEVRELAERIKEVVTESVKHSKKNVDEMRKLVDDVVKKVKKLVEDVRREIK

SEQ ID NO: 22761 - protein, 60 aa, Artificial Sequence
  Synthetic
SVAEKLRKVLEELRDVLRRVKEISRRSLERLKKVLKELADRLKELNDKLRKTLEELRKDV

SEQ ID NO: 22762 - protein, 59 aa, Artificial Sequence
  Synthetic
EELVEEIVKEIKKLAKEVAETVDKVAKENEKLAKEAKEKVEESERDVERLLEELKREAD

SEQ ID NO: 22763 - protein, 56 aa, Artificial Sequence
  Synthetic
DEEKILEDVLRELKKVLDEVRKTNEDANKRLKDVDDKSHEILKRVEERLREVVKRV

SEQ ID NO: 22764 - protein, 56 aa, Artificial Sequence
  Synthetic
VEDVVRRVRKVAEDVRRSSEETVKRIEDVVRRSEETVRELVKRVEDLVREMEEEAK

SEQ ID NO: 22765 - protein, 56 aa, Artificial Sequence
  Synthetic
SDEEKLRKVERELEEADKESHEINRTVNEDLRRVDRESKEILDRVRKELEEVKDKI

SEQ ID NO: 22766 - protein, 56 aa, Artificial Sequence
  Synthetic
VEDLVRRVRKVAEDSRRSSEDTVRRVERVVRESKRLVDDLVRRARRVVEEIKRTAK

SEQ ID NO: 22767 - protein, 56 aa, Artificial Sequence
  Synthetic
KEDEILKTVVDELRDALREVEERNRTVNEELRRADKESEDRLRKVVRELTEVMKRV

SEQ ID NO: 22768 - protein, 56 aa, Artificial Sequence
  Synthetic
VEELVRRVREVVKRVRDSSRETVERVKRVVERSRRLVERLVRKVEEVVREVEERAR

SEQ ID NO: 22769 - protein, 60 aa, Artificial Sequence
  Synthetic
SDVDRFLREVERLVERARKLSERDERETRKVVKEVRDSSRKSVEDSKRVVEKLEEEARRG

SEQ ID NO: 22770 - protein, 56 aa, Artificial Sequence
  Synthetic
KEKLDKVLEDLRRVVEEVKRRNDEVLKRLKEVVDEVTKRNRKALEDAKERLKKVTE

SEQ ID NO: 22771 - protein, 60 aa, Artificial Sequence
  Synthetic
SEVDEVAKRVREIVERLRDLVRKVVEDNERIAREVKRSSDETLKEIRDIVRKAKEVADRG

SEQ ID NO: 22772 - protein, 56 aa, Artificial Sequence
  Synthetic
ERKIDKVLKELEEVITDVRRTLDDVDRKLREVVKKVEEINRRANEELERVIREVRR

SEQ ID NO: 22773 - protein, 60 aa, Artificial Sequence
  Synthetic
DDVERLLKKVEDIVRELRESSRKSVEEIKRIVKEVKRLVDEVVKENERIVEEAEDVMRRG

SEQ ID NO: 22774 - protein, 56 aa, Artificial Sequence
  Synthetic
REKLDEVLKRARDVLREVEKENDKANKELEEVAERVKKTLDDVDKKLEDVMRKVTK

SEQ ID NO: 22775 - protein, 60 aa, Artificial Sequence
  Synthetic
KEEEIVERVREKIKRVLDEVREIDKRAHDELRRVLKEVEDIVRKVHEDLKRVLEEVRREV

SEQ ID NO: 22776 - protein, 56 aa, Artificial Sequence
  Synthetic
VKTVVETVDKIAKEVRDLSRRSVEENRKLAREVREVVRKVVEDNRRLAREVRERVR

SEQ ID NO: 22777 - protein, 60 aa, Artificial Sequence
  Synthetic
DEDEKVEKVTREVEKALDEVRKIDEEAHRRLKRVLDEVRRIDETVHRDLKRVLDEVRERV

SEQ ID NO: 22778 - protein, 56 aa, Artificial Sequence
  Synthetic
VETVVERLRRLVEDIRRKSRESVERNRELVKEAKDVSRKSVEENKKLVRDITREAT

SEQ ID NO: 22779 - protein, 59 aa, Artificial Sequence
  Synthetic
SVDEIVERVERELKRVLDEVREIHDRARDELRRMHERSERIIRKVEEELERALKEVRDR

SEQ ID NO: 22780 - protein, 59 aa, Artificial Sequence
  Synthetic
DKVVREAVREVERVVTELLEESRRSVEKTERLVRRSEELIRKIVKEVKKVAREIREEVR

SEQ ID NO: 22781 - protein, 59 aa, Artificial Sequence
  Synthetic
SVDEILRKVKEELDRVLEEVTEIHRKAKEELDRAHDTSERIHREVKRELDRVREEVERQ

SEQ ID NO: 22782 - protein, 59 aa, Artificial Sequence
  Synthetic
EKVVKEVVDEVRKVVEEIRKKSKDSVDKTKRVVEESIRTSDEVVKKTEKLVREIEKEVR

SEQ ID NO: 22783 - protein, 59 aa, Artificial Sequence
  Synthetic
SVEEIVRKVTKELRDAHRRTEKILRDVDKELKEVLDRVRKIHRDVKERLEKVLDDVRKR

SEQ ID NO: 22784 - protein, 59 aa, Artificial Sequence
  Synthetic
EEVVTRAVERVKRAVKKSEDDVRRIVDENRKLVKEIEDRSRESVKKTEELIERIRKRVE

SEQ ID NO: 22785 - protein, 60 aa, Artificial Sequence
  Synthetic
NVEDILRKAEEEVRRMLAENERIVEEAKERAKRMLDESRKRLEEVLRRAREVLEEVDKRK

SEQ ID NO: 22786 - protein, 59 aa, Artificial Sequence
  Synthetic
EDVVRAVVEELRRLLEESIRHVRKVVREIEKLLREDIELVKEVVRRIERLLRELDKEVR

SEQ ID NO: 22787 - protein, 60 aa, Artificial Sequence
  Synthetic
RKVDELRKEVRRVVKESRDKAKRVVEEVKRLVEKSRRDVKRVVDENRRVVEEMRRKVKDR

SEQ ID NO: 22788 - protein, 56 aa, Artificial Sequence
  Synthetic
DKEVKDAEDELDKAHEDTKKILDEVKKELDDAHDETRRILEEVNKESETVLEEVER

SEQ ID NO: 22789 - protein, 60 aa, Artificial Sequence
  Synthetic
SLARRVEEEVKRVVDESEEKVRRVVKVNKEMVDDVRRLVKEVVDENEEVVKEVRDTVTKR

SEQ ID NO: 22790 - protein, 56 aa, Artificial Sequence
  Synthetic
REDVRRVEEELKKAHDDTKKILDDVDERSREALDEVRKELDRVNKRSDKALKDVRK

SEQ ID NO: 22791 - protein, 60 aa, Artificial Sequence
  Synthetic
SKAEELVKRVKEVVDKVRKLVEEIEEKVKRVVEKSRRDVTEVVKKNREVVKRVKDTVRRR

SEQ ID NO: 22792 - protein, 56 aa, Artificial Sequence
  Synthetic
EEIVRRAREELERVLDEAKRILEKVTRELDEAHKETEKILRDVNRESDKALEEVER

SEQ ID NO: 22793 - protein, 59 aa, Artificial Sequence
  Synthetic
SEDEKLDKVRKRLERAHEESKKISDKSEKDTRDAHRKTEEILDRVRKEMEEVLKRVRDR

SEQ ID NO: 22794 - protein, 56 aa, Artificial Sequence
  Synthetic
AEEIVKDVERVVKESEDLVRRIVEINERIVRESERLVKEVKDRVRDMVRRLAEEAR

SEQ ID NO: 22795 - protein, 59 aa, Artificial Sequence
  Synthetic
SVEDIIRKVEKEVEEVVEKVERILDTVRRRSEKVLRENKEILEEVKRRADKVLRDVERN

SEQ ID NO: 22796 - protein, 59 aa, Artificial Sequence
  Synthetic
EEVAKRLEDRVREIVRTLEDLVREIVRRSEESVRRSRESAKRVVDTVKRIVDELEKRVR

SEQ ID NO: 22797 - protein, 60 aa, Artificial Sequence
  Synthetic
DVEEIIRRVSDKARKVLDRNRKILEDVKRRSEEVLEENKRIVDEVDEIIDEVLKRVKKRS

SEQ ID NO: 22798 - protein, 59 aa, Artificial Sequence
  Synthetic
REVVDRAVKRVEELVKRSERSADEVRKRSTESVKESKRSAKKVVEDVRRLVEELERRVR

SEQ ID NO: 22799 - protein, 60 aa, Artificial Sequence
  Synthetic
SEEDIIREAERIAREALKRARKIAEDARRISEKALEDARRIAKEAHDISKKALEDAARKR

SEQ ID NO: 22800 - protein, 56 aa, Artificial Sequence
  Synthetic
AKRAAEEAKRLAEEAEEAAKRVADRNRKLAKEAADLAREVAKRSEELAREAAKKAQ

SEQ ID NO: 22801 - protein, 60 aa, Artificial Sequence
  Synthetic
REDEKIEEVKRRAEEVLKESKKIIEDVLKKSEEVIKEVREILEKAHRISAKVLDEVRKTR

SEQ ID NO: 22802 - protein, 56 aa, Artificial Sequence
  Synthetic
VDEVVERVERIVTKNLRLAERVVEENEKLVEDLRRLVADVVRTSKKLVDDVRERVR

SEQ ID NO: 22803 - protein, 60 aa, Artificial Sequence
  Synthetic
SEDEKVDEATKEAERVLREVRKIIKRAHDRSRDAEREVKRTLDEVRRETKRVLEDVDRTR

SEQ ID NO: 22804 - protein, 56 aa, Artificial Sequence
  Synthetic
VDEVVRRVKEIVRRLEELAKEIERRSDEIVEEIRRLVKKVVDENRKIVKKAEEDAR

SEQ ID NO: 22805 - protein, 60 aa, Artificial Sequence
  Synthetic
DEDEIIDEAKKRADEVLKRSEDILRRAREEVEKVLEEVRKIIEDVHRRSRKVLEDVRRKA

SEQ ID NO: 22806 - protein, 56 aa, Artificial Sequence
  Synthetic
VETVVRRVDEIVKRNEELARRLVEEAKKIVDDLRRLAEEIVKRSEDLVEKLKEDAR

SEQ ID NO: 22807 - protein, 60 aa, Artificial Sequence
  Synthetic
SIEDVLRDVARKLRTVVDEARKILDEVDKATEKVLREAERVIREVAKRDKKVVDEVRKGG

SEQ ID NO: 22808 - protein, 56 aa, Artificial Sequence
  Synthetic
AEDLLKLVEDVVRRIRKLAEDVKRENDKLVERIREVAEDVLRHSEETVEEARKAAE

SEQ ID NO: 22809 - protein, 60 aa, Artificial Sequence
  Synthetic
SSEEALKEVERRLEDVRREVKRVAEEIKKKDDKVNDDAREKLERVNRETKRVLEELAREG

SEQ ID NO: 22810 - protein, 56 aa, Artificial Sequence
  Synthetic
VEELKDKVRRLLEELKRLLEELDKHSARTIKEIRDLIETLRRINEKVIEDMKRRRD

SEQ ID NO: 22811 - protein, 60 aa, Artificial Sequence
  Synthetic
SELDEAKRLVDEVVRRLEELLREDKKLVAEVEREVRELLERNARLLKEVADRIRRLKEEG

SEQ ID NO: 22812 - protein, 59 aa, Artificial Sequence
  Synthetic
EKVVREIERLLRELEKALEDVERELRRSKDRLRKLAEEVKKVLDDSRRELERLREELRT

SEQ ID NO: 22813 - protein, 60 aa, Artificial Sequence
  Synthetic
KDIEDAVRDVRRKVKELIENSERVVRTVEKLVRELIDHSRKVVREVEKLAKELIELKRRG

SEQ ID NO: 22814 - protein, 56 aa, Artificial Sequence
  Synthetic
EEVLKEVDRVLREAEKRSKEINEESKRVLDKAERDSRRIDRKSEEVVKRAEEEVRT

SEQ ID NO: 22815 - protein, 60 aa, Artificial Sequence
  Synthetic
EEIERVLRRVTERLKELERHSEEVLREVERLVKEDEDLAREVVKRVEELIRTLRELKKRG

SEQ ID NO: 22816 - protein, 56 aa, Artificial Sequence
  Synthetic
RRVLEEVREVVDRAEKKIKELDDRSREVLKEVEKRSRDIIREIEEKLKDVEERVKD

SEQ ID NO: 22817 - protein, 60 aa, Artificial Sequence
  Synthetic
SKAEEVAKRVEDLAREDIKLAERAAREVERLARENIKLAREVAKRVEELARRLIEAARRG

SEQ ID NO: 22818 - protein, 56 aa, Artificial Sequence
  Synthetic
EKALKDAEDAARKAAEDSERAIERAERAAKDALKKSEDAAEEAKRAADKALEDAAR

SEQ ID NO: 22819 - protein, 60 aa, Artificial Sequence
  Synthetic
DEVRDLVRRVRELSEELIRRVRTLLREVEELSRRLIEESERLLREVRKIVEELIRRVERR

SEQ ID NO: 22820 - protein, 56 aa, Artificial Sequence
  Synthetic
ERVVKEAEEVVERANRESEKLLEDVKRVVEEANKTSEDILRAVEEIVRRVLEELKK

SEQ ID NO: 22821 - protein, 60 aa, Artificial Sequence
  Synthetic
SSKEVLERVAEKLKEVNERLKDVLRRVAEKLKRANEENKKVLERVRDILREVLRRLREKV

SEQ ID NO: 22822 - protein, 56 aa, Artificial Sequence
  Synthetic
VEEAERVVEKSVEEARRLAERVKEEVDRSVKHSEDNVREMRRLVEEIVKRVEEAAK

SEQ ID NO: 22823 - protein, 60 aa, Artificial Sequence
  Synthetic
REKEVLDRVEEILRDANRRNEKVLREVAEIIRTVIEDNKRVLKEVADELRRVLEELRDKV

SEQ ID NO: 22824 - protein, 56 aa, Artificial Sequence
  Synthetic
VEEMEDVVRRSLDHSRRNVEEAKKAVTKVVEDNKDNVRRIKEVVARVVEKAREEAR

SEQ ID NO: 22825 - protein, 60 aa, Artificial Sequence
  Synthetic
SEVEEVLRRSRESAKKSKEHSRELLEKVKRIIDDVKRLVREVLKRSRDSIKRVEDLTRRG

SEQ ID NO: 22826 - protein, 58 aa, Artificial Sequence
  Synthetic
EKVKEAVKESRDLLRKVEETNRRVNDEVRKLLEDIRRDVERAVEESERLLEDIVRKVK

SEQ ID NO: 22827 - protein, 57 aa, Artificial Sequence
  Synthetic
SDVERVLTEIRKLVEDIKRDVERVVDESRKLVEEAERDVERVITEVEKLVERIKREV

SEQ ID NO: 22828 - protein, 56 aa, Artificial Sequence
  Synthetic
ARELLKRVRELIKEHNRLNRESLKTSRKNIEDHHEDNKRSLEEARRIIEEVREAAR

SEQ ID NO: 22829 - protein, 60 aa, Artificial Sequence
  Synthetic
KELEDVEKEVEEVAKRVEDSIRRNREVVEKVKDEVRRLLDRNDELVDRVAKEITEAIKKG

SEQ ID NO: 22830 - protein, 58 aa, Artificial Sequence
  Synthetic
EKVKKVLEDVRRRLEELIKRSEDSAREVEKRLEDLRREVEESLERVERTLEDLVRRVK

SEQ ID NO: 22831 - protein, 60 aa, Artificial Sequence
  Synthetic
SELERLEERVRRIEEEVKRLLEEHREVSDRVAKENRRSNEESKREVRRIEEEVKDLSRKG

SEQ ID NO: 22832 - protein, 58 aa, Artificial Sequence
  Synthetic
EEVKKVVEDVKRRLDDLIRKAEKVVRDSERELKKLVDHSKEVVDRVRERLKELIEEAR

SEQ ID NO: 22833 - protein, 60 aa, Artificial Sequence
  Synthetic
SEVEDLERRVKRILEESDELVKRHEEKSRKIVKDLEDLLRRNEDTVEKILRELEKRIRDG

SEQ ID NO: 22834 - protein, 58 aa, Artificial Sequence
  Synthetic
ERVTRVVEKVRRLLEESKRRSKEVVKRSKDLLKEAEDRADESVRELRRKLKELEEKAE

SEQ ID NO: 22835 - protein, 59 aa, Artificial Sequence
  Synthetic
SELEDIRRLLEKLDREVKELLKRSRDLAKEMEERVRKLVKESEDELRKLAEKVDRIKKN

SEQ ID NO: 22836 - protein, 58 aa, Artificial Sequence
  Synthetic
DEAREVLKDVRRKVEELRKELTKVDKEIEEIVRELEKRLREVNERVRTIVDELAKRLK

SEQ ID NO: 22837 - protein, 56 aa, Artificial Sequence
  Synthetic
SMLEELDKEARELLKEVRRLVEDNDRLLEELLRRARELLERNDRISEKVADEVRKI

SEQ ID NO: 22838 - protein, 58 aa, Artificial Sequence
  Synthetic
ERMREVAKKVKDILKRAEEEVRESLERVRRELERVIRELEDSLRRNDKTLRDLIEERR

SEQ ID NO: 22839 - protein, 56 aa, Artificial Sequence
  Synthetic
SDLERLDELLKRVLEKARKLVKENDEHSEEVRKTVEKVVRDNDKLAEDLADKVEKI

SEQ ID NO: 22840 - protein, 58 aa, Artificial Sequence
  Synthetic
ERVKEVLDRVDEILKRVIKAAEESLKRSHEINRRLIKAAEDSLRRVKKILDELEERVR

SEQ ID NO: 22841 - protein, 56 aa, Artificial Sequence
  Synthetic
STLDKLRELLRRVEETVREVLERNDEHSKEVKRRVDKLLRENDEHSKELADLVRKI

SEQ ID NO: 22842 - protein, 58 aa, Artificial Sequence
  Synthetic
REMEKVLTDARRSLRRLEERVRESLERSHRINRKLRKDVRESLERSKRILDKLREEVR

SEQ ID NO: 22843 - protein, 56 aa, Artificial Sequence
  Synthetic
SVLEELRKLVEKVLREVDKLLKDNNRHSEEVEKTVKRLLDENDRLLEELADRVEKI

SEQ ID NO: 22844 - protein, 58 aa, Artificial Sequence
  Synthetic
EEAKKVLTEVRRTLEELERRVRKSLKDSHDINRKLEKEVRDSLKRVKDRLDELIKRVR

SEQ ID NO: 22845 - protein, 57 aa, Artificial Sequence
  Synthetic
RKAEEVLKRAKKIVDEVDKKNRESLERTRKIVEDVNEENREVLDRLRRRAEELKKEV

SEQ ID NO: 22846 - protein, 59 aa, Artificial Sequence
  Synthetic
DDVVRRIEEVIEKARRENDESVRRDEKLMKEVKDENKKTVDDIRRLLKDIEDKVREAKR

SEQ ID NO: 22847 - protein, 57 aa, Artificial Sequence
  Synthetic
SKLEEVVKRLEEIVRRVKRADEESLKRTRKIVEEVNRDNRRSLKESRDRVDELKKRV

SEQ ID NO: 22848 - protein, 59 aa, Artificial Sequence
  Synthetic
DEVVKRIEEVAKRNEELNRETVKRDEDLVREAKRRNEETVERDKRLVEKITKEVDETKK

SEQ ID NO: 22849 - protein, 56 aa, Artificial Sequence
  Synthetic
SLIETIRDLAKKLKEESDKSVETDKRLVEELRRRSKKTVDDIDELVKRLERMVEDD

SEQ ID NO: 22850 - protein, 58 aa, Artificial Sequence
  Synthetic
EDAKRVLEELKRIIEDLLRKNKKSLDDTEREVRRLIKENETVVRKLEEIVKRLEEKIR

SEQ ID NO: 22851 - protein, 56 aa, Artificial Sequence
  Synthetic
SLLEEIAELVERLRRESKESVKRDEELVDELKKRSEETVKEDKRLAEELDRLAKKI

SEQ ID NO: 22852 - protein, 58 aa, Artificial Sequence
  Synthetic
EEMKKVLDDLRREIKKLEEENERSLERTRDIVRKLDRTNEESARESEKIIREVVKEVK

SEQ ID NO: 22853 - protein, 56 aa, Artificial Sequence
  Synthetic
SLLERIKEEVEKLRKESEESVETDERLVEELKKEVKDLVEKDRKLAEDLKDEVDKD

SEQ ID NO: 22854 - protein, 58 aa, Artificial Sequence
  Synthetic
ERAKEVLRDLRRTVKELTDENEKSLERTRREVEKLIRELEESLRESRRRVKRLLEKVK

SEQ ID NO: 22855 - protein, 56 aa, Artificial Sequence
  Synthetic
SLLEEIERRVEELEDRSRKSVERDKELAKEVDDRNEESVRTDEELAKRLADLVRKR

SEQ ID NO: 22856 - protein, 58 aa, Artificial Sequence
  Synthetic
ERMEEVLKRLKEIVKELEERNRESLERTRRILEEVDRKNEESLKRSREIVRELDERVR

SEQ ID NO: 22857 - protein, 56 aa, Artificial Sequence
  Synthetic
SLVEEIERRVEKLAEEVKRLVERDRKEVEKLEKESRDTVREIEELADRLRDAVEKE

SEQ ID NO: 22858 - protein, 58 aa, Artificial Sequence
  Synthetic
DEMRKVLTRLREEVRRLLDELRRSLEDTKRTVEDLERKNKTVVDELRKTVAELERRAR

SEQ ID NO: 22859 - protein, 59 aa, Artificial Sequence
  Synthetic
SIDEVLKRIREISDDAKRKIKEVVEEIKKNADRLRREIERVLDEIRKVIRELLERIKRV

SEQ ID NO: 22860 - protein, 59 aa, Artificial Sequence
  Synthetic
DEDLERLLREVERRTRRHEEELERLLRHNNKVSKEVREELKRLLDRVREMLEDVDRKLK

SEQ ID NO: 22861 - protein, 59 aa, Artificial Sequence
  Synthetic
SVEEVRKEVKRISDEAREEIERVLERIKENAKRLIEDIRRVLEEIEEIIRRLEDEIRRV

SEQ ID NO: 22862 - protein, 59 aa, Artificial Sequence
  Synthetic
DEDLEELLRRLERISRESRKRLEELLKHNNKESEEVRKRLKELLDDVRRVVEEVRRKLK

SEQ ID NO: 22863 - protein, 59 aa, Artificial Sequence
  Synthetic
SIDEVLEELKRISTEAVERIRRVAERNRKSVEEVRKRIEEVAKRIREIATRLLERIRRV

SEQ ID NO: 22864 - protein, 59 aa, Artificial Sequence
  Synthetic
DEELKKLLDELEKISRDSDERLKESTKKVRDVNRESDKKLKELLKRVEDVLEKVDRELK

SEQ ID NO: 22865 - protein, 59 aa, Artificial Sequence
  Synthetic
SVDEVLERIRESAETILEEIRRVLERNKRSAETILEEIRDVARKIEKRIRDVLKKIEDV

SEQ ID NO: 22866 - protein, 59 aa, Artificial Sequence
  Synthetic
DEELRKLLEEVKKINDDSRRKLEKSTRDVKKVNDDSRRELERLLRKVEEVIRRVDEELR

SEQ ID NO: 22867 - protein, 60 aa, Artificial Sequence
  Synthetic
KLEELVEEVEKVVREVKKELEDVVRTVREVVKRSKDDLREVVKEVERINRELEERLRRLA

SEQ ID NO: 22868 - protein, 55 aa, Artificial Sequence
  Synthetic
TELLERVKTLIKEIRDRLRRLLEEVKRLVEESKKDLKRLLDENKRLVDEATKTAK

SEQ ID NO: 22869 - protein, 60 aa, Artificial Sequence
  Synthetic
SLEELLKEVEKVIRDVKRELEKVVRDIEENVRRSAKRLREAEEEVERINRRLEEELKKKT

SEQ ID NO: 22870 - protein, 55 aa, Artificial Sequence
  Synthetic
TELLKRVRDLIRRIRETLEKLLKENHDLSKRSKEDVERLLKENADLVKELTDRAE

SEQ ID NO: 22871 - protein, 60 aa, Artificial Sequence
  Synthetic
SLEDLLREVKRVIEEVKRELEEVVRRVKEIVERSVRDLRRVVDEVRRINTELEERLRRLT

SEQ ID NO: 22872 - protein, 55 aa, Artificial Sequence
  Synthetic
TELLRRVEELIKEIRKELKRLLDEVKDLVDKSKENAKKLLEDNKRLVEKIARDAT

SEQ ID NO: 22873 - protein, 60 aa, Artificial Sequence
  Synthetic
KLEELVREVEKVVDDIRKELEEVVRRVEEVVRRSKRTLEDVVRRVKKINDDLEKELRERS

SEQ ID NO: 22874 - protein, 55 aa, Artificial Sequence
  Synthetic
TELLEDVKRVLDEIRETLERLLRKVEELVERSKRNAEELLKRNEDLAKKVRDDAK

SEQ ID NO: 22875 - protein, 56 aa, Artificial Sequence
  Synthetic
DVEDVLRKIEEIIRRVLEEIKTVLDEIRKNNEKLKEDVDRVLAEIEKDSEDLKRKI

SEQ ID NO: 22876 - protein, 58 aa, Artificial Sequence
  Synthetic
ELAETILRRVEELVEEIRRRLKEILDRDHELSKRLKEELKKILDDNHKLSRDAAERAR

SEQ ID NO: 22877 - protein, 56 aa, Artificial Sequence
  Synthetic
SVEDVLREIKETSDDAARKADEVLKEIEKNNRRLKKEIDRVHEHTKEDSRRLKEEI

SEQ ID NO: 22878 - protein, 58 aa, Artificial Sequence
  Synthetic
DLMREMLERNRKLIEDLKRELEDILRRDHRLSKELLARLKESNEENHRLSKEIRERRK

SEQ ID NO: 22879 - protein, 56 aa, Artificial Sequence
  Synthetic
RVEDVLRKVEEIIRRLKEEIDRVLEKIRETSERAVKDIRDVLRRIREDSKRLKEDI

SEQ ID NO: 22880 - protein, 58 aa, Artificial Sequence
  Synthetic
EDAERIVEEVRKLVEEIRKELEDILRKNEKLIEDLKRELKKILEENHRLSREIRERRR

SEQ ID NO: 22881 - protein, 56 aa, Artificial Sequence
  Synthetic
SAEDVLREITKTSERAREDIKRVLDEIKRTSDEAVKTVTDIHEHTRKTSEDLKRKI

SEQ ID NO: 22882 - protein, 58 aa, Artificial Sequence
  Synthetic
EVLRKILEENRELIERLKKELKELLDRNRKLIEDLLREAEKSNEDNKELIKKAEEDAR

SEQ ID NO: 22883 - protein, 56 aa, Artificial Sequence
  Synthetic
SVEKVLEDITRELRRADEESKRALDHSAEVLKDLERRVKEVLDESREIIKELERRL

SEQ ID NO: 22884 - protein, 59 aa, Artificial Sequence
  Synthetic
DEEAKRVLDEVEKLVRELKKRNDELNEKTERLVRDLRRRLKDSLDKSRDLVRRLEEKAK

SEQ ID NO: 22885 - protein, 56 aa, Artificial Sequence
  Synthetic
SVEEVLDEVRRIIEELLRLSEEMLRHSEEVIRDLERVSREVLERSKRIIDELLREL

SEQ ID NO: 22886 - protein, 59 aa, Artificial Sequence
  Synthetic
DEVAKRAVEDVRRVVEDLERRNRTLNEKTKRLVEKLTRDNERSLKESKKVVDELREEAR

SEQ ID NO: 22887 - protein, 56 aa, Artificial Sequence
  Synthetic
SVEEVLDEIRKRIEDLKREVDEVLDRSRRIIETLKERVDRVLKHSRELIKRLKDKL

SEQ ID NO: 22888 - protein, 59 aa, Artificial Sequence
  Synthetic
DEEMKRALEEVKKLLDRLREELKRSLDESRKLVEELERRLRESNEESERLIRKLEREAD

SEQ ID NO: 22889 - protein, 56 aa, Artificial Sequence
  Synthetic
SVEDVLREVEKIIRELDRKSEKVLEDSKRVIEDLKRKVEEVLRHSETLIRDLERRL

SEQ ID NO: 22890 - protein, 59 aa, Artificial Sequence
  Synthetic
DELAKEMVDRVRELVKKLEEENRRSLEESKKLVEELARRLERSNTESKRLIDKLREEAR

SEQ ID NO: 22891 - protein, 56 aa, Artificial Sequence
  Synthetic
SVEEVLKDIEKKIRDLDRKVKEALRHSEEVIRRLEEEVKRVLDDSERILRDLKEKL

SEQ ID NO: 22892 - protein, 59 aa, Artificial Sequence
  Synthetic
EELMRRIVEKVEELVKELDKRLRESNEDSKRLVEDLSRRAKKSLEESRELVRELKKRAK

SEQ ID NO: 22893 - protein, 56 aa, Artificial Sequence
  Synthetic
SVEEVLDRIRKIIKELLDRSEEALRHSEEVIKDLERKVEEVLERSREVIRELLERL

SEQ ID NO: 22894 - protein, 59 aa, Artificial Sequence
  Synthetic
DEELKTMLEEVKKVVEELLRRNRKSNEDSKELVKELTRRLRKSLEDSKELVRKLEEEAR

SEQ ID NO: 22895 - protein, 56 aa, Artificial Sequence
  Synthetic
SVEDVLREIEEILRRLEKESDDALEHSRRVIKRLEEESDRVLEESRRVIEELERKL

SEQ ID NO: 22896 - protein, 59 aa, Artificial Sequence
  Synthetic
DEEMKKLLEDVKRLVDDLRRKNEESNRRSKELVDKLDKENKDSLKESRELVEKLEREAR

SEQ ID NO: 22897 - protein, 59 aa, Artificial Sequence
  Synthetic
SVEEVVREVEEKLRKLIDDVRRVVEENRRNTERLRKRVTEVVKRNEDILRRLEEDIRRV

SEQ ID NO: 22898 - protein, 59 aa, Artificial Sequence
  Synthetic
EEVAKTALRKVEDLLKKLKERAEDSSRDNHRISKELTEELEESSKRVKTLVDELRKTVK

SEQ ID NO: 22899 - protein, 57 aa, Artificial Sequence
  Synthetic
SVEEVLKESREISTRLAEEVKRVLDEIRRILERVKRINEKVNKDIEEILRRVKKTVG

SEQ ID NO: 22900 - protein, 59 aa, Artificial Sequence
  Synthetic
ERVAEKILKEDRDTVERLRKRVEDLLRDVRRLVEDSERKSRDLLRRVEELVRELKKRVD

SEQ ID NO: 22901 - protein, 57 aa, Artificial Sequence
  Synthetic
SVEEVLKESKRVSEELNELNKKVNDDIRKILEKVNRENKKVNEDIERELRKLEEEVG

SEQ ID NO: 22902 - protein, 59 aa, Artificial Sequence
  Synthetic
EEVAREILRDDKRTVEESKRESKRLLERVKKLVDRSAEESKKLLEDVKRLLEELRERAR

SEQ ID NO: 22903 - protein, 57 aa, Artificial Sequence
  Synthetic
RVDEVLDESKKVSDRLHESIRRVLEKIEEILRRVNEENRRVNEEMKRILDELARTVG

SEQ ID NO: 22904 - protein, 59 aa, Artificial Sequence
  Synthetic
ERVAREILKADRETVRRLEKRAKDLLDEVRDLVRESEKRSRELLKEVEDLVRKLTEEAR

SEQ ID NO: 22905 - protein, 57 aa, Artificial Sequence
  Synthetic
RVEEVLKRMRDILRRVNEINRRVNRELERSSREILERIREILDRIRRILERLEERVG

SEQ ID NO: 22906 - protein, 59 aa, Artificial Sequence
  Synthetic
EKVARDLLREVEELVKESEELSEELLRRSRRSNEESLRKAEKLLETVRRLVEELEKKTT

SEQ ID NO: 22907 - protein, 60 aa, Artificial Sequence
  Synthetic
SEAEAVEEEVRRLVEESEKRSKELLEDVERLVEESERRSKKLLDDVRKLVDDLKKELRRV

SEQ ID NO: 22908 - protein, 56 aa, Artificial Sequence
  Synthetic
DRVIERLKRILKEAHDKNKEVSDRIRKILEELHRKNRKVLEDIKRILDDVRREVER

SEQ ID NO: 22909 - protein, 60 aa, Artificial Sequence
  Synthetic
KEAEDLLREVEKLVRESKKLSEDLLREVRKSNERSKRESERLLREVERLVRELKDLRDKV

SEQ ID NO: 22910 - protein, 56 aa, Artificial Sequence
  Synthetic
DRIIERIKRILEKVHKINREASKRIKESLDRAHETNKRVLDRIRKIVDDVRREVER

SEQ ID NO: 22911 - protein, 56 aa, Artificial Sequence
  Synthetic
RLEEVKEELKRIATKLKEEIKENIRRLEESVEKIAKELAENIKRLEDILRDVKRKL

SEQ ID NO: 22912 - protein, 56 aa, Artificial Sequence
  Synthetic
GEELVERLRRVVEEVRERLKDSSRELRKINEDSRKKVEDSSREVKKVVEELERRDT

SEQ ID NO: 22913 - protein, 57 aa, Artificial Sequence
  Synthetic
KELEDVARKVEDLLRRIEKTNRDAIRESERLVRELKREVEKVEEESRRLLEEVERRI

SEQ ID NO: 22914 - protein, 56 aa, Artificial Sequence
  Synthetic
AKKLLDEVRKVIEDNRKRSEELLEENRKVVEDVSRTLERILRENERVADEVDKEER

SEQ ID NO: 22915 - protein, 57 aa, Artificial Sequence
  Synthetic
DELERVTEEIDKLSKDLERRVREVLEESRRLVEDVERVVREVLEEARRTAKDIADKV

SEQ ID NO: 22916 - protein, 56 aa, Artificial Sequence
  Synthetic
VDKLLEEVRKISEDSKERLKEILKRNEEVARRVKRELKRLLETNREIIRRVEERER

SEQ ID NO: 22917 - protein, 56 aa, Artificial Sequence
  Synthetic
RELEELLDKVRKIVEESKKRNEDLLREVREIVERSKEKIKKVLDEVRKIIETVRKS

SEQ ID NO: 22918 - protein, 58 aa, Artificial Sequence
  Synthetic
KEVEKVLRDVEELIRDSERASDRVLKDVEELIKDSERMSKKAEEDVDRLLRELDKDVR

SEQ ID NO: 22919 - protein, 61 aa, Artificial Sequence
  Synthetic
DSVERVAEEVRKLLEDIKRVSDEVTKRLRDLLEDLKRVSDKVRKDIERLLEDLEREVRRKG

SEQ ID NO: 22920 - protein, 59 aa, Artificial Sequence
  Synthetic
DRVLEEALRRVEELARRIKEHSKRVLETVRRLVEEIKKHSRKVLEEVRERIKRIKDELR

SEQ ID NO: 22921 - protein, 61 aa, Artificial Sequence
  Synthetic
SEVEKAEKDVRDLLKDLRRVSEKVKRAVEDLLRDLKRTSDKASEDAKRLLDDLRRKVEERG

SEQ ID NO: 22922 - protein, 59 aa, Artificial Sequence
  Synthetic
DRVVKEILDEVEKLIREIKKHSEDLLRKVRKDIKRVKDHTKRVLDRIRKLIEDIKRRLE

SEQ ID NO: 22923 - protein, 60 aa, Artificial Sequence
  Synthetic
DEVKELLDRVREEIRRDKERVKKLLEDSKRLNERDKREVKRLLEEVRELIKRLEDIIRKS

SEQ ID NO: 22924 - protein, 55 aa, Artificial Sequence
  Synthetic
EEVVKDLERLLRDLERVNDEVEKRLRDLTEDSKRFNDEVAREIEKLLEDVARTVK

SEQ ID NO: 22925 - protein, 60 aa, Artificial Sequence
  Synthetic
REAEELLKRVEDLIRRLKDMIRKLLEDSKRLNERDVETVKRLLEDVERTIREIKDEVRRD

SEQ ID NO: 22926 - protein, 55 aa, Artificial Sequence
  Synthetic
ERIVREVEKLLEKIKRDVDRVRRELERLTEESKRINDKAVRDIEELLEDLKRAVK

SEQ ID NO: 22927 - protein, 59 aa, Artificial Sequence
  Synthetic
DELERLLEDVERVSRETKKLLKKLLDDAKRVIDKNREDSRRSLEEVERVIREAKELLKD

SEQ ID NO: 22928 - protein, 62 aa, Artificial Sequence
  Synthetic
KDTERRVRDVVKKIRELSEDVEREAKKVIDRLKELLEDIERENRRVEEEIKKLLEDVERTAR

SEQ ID NO: 22929 - protein, 59 aa, Artificial Sequence
  Synthetic
KLVERLVKEAEDLTEEHKERLDRLLKENEKISRESKKRLKEILEENERVVEEVKKLLRD

SEQ ID NO: 22930 - protein, 59 aa, Artificial Sequence
  Synthetic
RKKVDEVRRRLEELHKELEKVVRDVKRTSEKLVRDSEDMARKVVKTSEDLLRELEEEAR

SEQ ID NO: 22931 - protein, 59 aa, Artificial Sequence
  Synthetic
SRAEDLVRRVEEMTRKHKKDLDDLLRENEEVSRRSKERIRKLLKDIKDVVDDVERVLRA

SEQ ID NO: 22932 - protein, 59 aa, Artificial Sequence
  Synthetic
RDKVEEVRERLKKLHTELEKRVREVKRDSERLVEDSERTVEELLRRVRKLLKEVRDSVK

SEQ ID NO: 22933 - protein, 60 aa, Artificial Sequence
  Synthetic
SEAERLVEEAERVTREHKKRLDDLLKEVRRVSEDSKRKLEKILKENEDVVEEVKELLKAG

SEQ ID NO: 22934 - protein, 59 aa, Artificial Sequence
  Synthetic
KEKVDRVRRELDRLHKELAEVVERVKRAVDKLLRDSEEEVKRVEERSERLLKEVADALR

SEQ ID NO: 22935 - protein, 59 aa, Artificial Sequence
  Synthetic
SDVDKLVDDVRRETEKHKKTARDLLDELRKVSEESRRRLKRLLEEITEVVERIKRVLEA

SEQ ID NO: 22936 - protein, 59 aa, Artificial Sequence
  Synthetic
EEEVRRAKEELDRLHKEVEDVVRDVTRELDRLLKRSREVVERVREEADRLLEEVERTLK

SEQ ID NO: 22937 - protein, 59 aa, Artificial Sequence
  Synthetic
SEVDELVERAERISRESKKTIKKILEDNERVSKRHKDELKKLLDELKRVVDEVRKVLER

SEQ ID NO: 22938 - protein, 59 aa, Artificial Sequence
  Synthetic
KEKVERALRELDRLLEESKRVVDEAEKTSDKLNKEVEEMARRVEEEVDRLLKEVRDDAK

SEQ ID NO: 22939 - protein, 59 aa, Artificial Sequence
  Synthetic
SEADELVKEIEDVSRRSKEELTRLLEEAEKVSREHKKTLEELLRRIEKVVRDIKEVLRG

SEQ ID NO: 22940 - protein, 59 aa, Artificial Sequence
  Synthetic
EKKVREVEKLLDKLLEESRKRAKEVLRALRELNREVAEVVRRVEERLRRLLKEVEEAVR

SEQ ID NO: 22941 - protein, 59 aa, Artificial Sequence
  Synthetic
SDVDKIVEEIERISRDSERRIREIVERNKKVSEDHKRELERLLKEMEKVVEDVKKVLKD

SEQ ID NO: 22942 - protein, 59 aa, Artificial Sequence
  Synthetic
KKKVDEARKKLRDLLERSKEVVKEAERRLEKSNRDVRREAERVRKALDDLLKEVDEAVR

SEQ ID NO: 22943 - protein, 59 aa, Artificial Sequence
  Synthetic
SRADELVERAKRMTDEHKKTAEDILRENKRVSDEHKKTLEKILRENEKIVDEVAKLLEE

SEQ ID NO: 22944 - protein, 59 aa, Artificial Sequence
  Synthetic
KDKVREVEEELKRLHKEVEDVVDTVRRTSEKLNDEVRKVVETVTRRSEELLEELRRRAK

SEQ ID NO: 22945 - protein, 59 aa, Artificial Sequence
  Synthetic
KEVEKLVTEIREMTERHKRTLEELLKEAEEVSRRHKEDLKRLLDENRKIVEEVARVLEK

SEQ ID NO: 22946 - protein, 59 aa, Artificial Sequence
  Synthetic
KDKVERVLREADRLHEEVRKVVEKVREELRRLNEEVRKVVEEVRRDSERLVREVEERAR

SEQ ID NO: 22947 - protein, 59 aa, Artificial Sequence
  Synthetic
SRVDELVDRARKMTEKHKEELKRIVEENRRVSKEHKERLEDILRRNAEIVERVKEVLKR

SEQ ID NO: 22948 - protein, 59 aa, Artificial Sequence
  Synthetic
EDKVRRALEELKKLHDELAKEAKRVEELLDKSNEEVEKVVRDVREASERLLEELERTAK

SEQ ID NO: 22949 - protein, 59 aa, Artificial Sequence
  Synthetic
DEVKKLVDDARRLTEKHKTDLERLLDEARKVSEEHKKRLEELLREIAEVAKEILKVLRK

SEQ ID NO: 22950 - protein, 59 aa, Artificial Sequence
  Synthetic
REKVKRVEETLERLHKEVEEVVRRVKKALRDLNDEVRRVVDEVRRRLEELLKRVEEEAR

SEQ ID NO: 22951 - protein, 63 aa, Artificial Sequence
  Synthetic
REVDEVEERVTRLLKKVRDVAEESRRRSEELLKKSRDVVEEVKKEVDKLLEEVRDMVRRVKDK

SEQ ID NO: 22952 - protein, 59 aa, Artificial Sequence
  Synthetic
GRVLKKLVEEVKKLADEIERELERTSKEIEELSRRSEEDLRRLVRKLREVVRKIEEDLR

SEQ ID NO: 22953 - protein, 63 aa, Artificial Sequence
  Synthetic
REVERVERELERLLEEVREVAERSERESKKLLEDTRRVVRKVKEDVRRLLEEVRDVVRKVKDK

SEQ ID NO: 22954 - protein, 59 aa, Artificial Sequence
  Synthetic
GDVIRRMVEEVEKLARRIKETLERTVRRLEELVRRSEKNLRTLVEEVRKAVERIKETLR

SEQ ID NO: 22955 - protein, 63 aa, Artificial Sequence
  Synthetic
SEAERVEEDVRRLLKRVEEVIKRSEERSRELLKKTEDVVREVRKRVKKLLDEVKDTLDKVRDK

SEQ ID NO: 22956 - protein, 58 aa, Artificial Sequence
  Synthetic
EVLDRLVEELRKLVEEIERDLERTVREIEKLVKDSDRNLEDMVRELRRVAERIKEELR

SEQ ID NO: 22957 - protein, 60 aa, Artificial Sequence
  Synthetic
REVDEVRRRAEELLKEVRDVVTESEKESRRLLEDTRRVVEDVKRRVDRLLEEVRDLLREV

SEQ ID NO: 22958 - protein, 58 aa, Artificial Sequence
  Synthetic
DVLRELVKRLEDVAREIKKRLEDTLRKLEEVSRRSKENLRELVERLRRIADEIRERLR

SEQ ID NO: 22959 - protein, 61 aa, Artificial Sequence
  Synthetic
DEVDRVREEIERLLREVEEVLERSERESRRLLREVEEMLERSDEEVRRLLKEVEEVLRDEL

SEQ ID NO: 22960 - protein, 58 aa, Artificial Sequence
  Synthetic
EVLEEILRRAKEEVEKLKRELERTVERLAELVEELKRELERSTREVRKTVEELKRRIK

SEQ ID NO: 22961 - protein, 61 aa, Artificial Sequence
  Synthetic
DEAEDLERRARELLEEVERVLEESIRRSEETVKEVEDMLRRSTEEVERLLKRVEDVLREEL

SEQ ID NO: 22962 - protein, 58 aa, Artificial Sequence
  Synthetic
ELLKRLIDEVRRLAEKIKEELKESSKRDEEKVEKLKKELKDSTDAVRELVERLEREIK

SEQ ID NO: 22963 - protein, 60 aa, Artificial Sequence
  Synthetic
DEVEELVKEVEERIKKVHKENEDVLRESEELMKRLHEENERLLREVEELVRRIRELRKRG

SEQ ID NO: 22964 - protein, 55 aa, Artificial Sequence
  Synthetic
REARERIRRLLTESRKSVEEVEKRLRELSKRSEESVERVERTARRLLKELEDMTR

SEQ ID NO: 22965 - protein, 60 aa, Artificial Sequence
  Synthetic
EEVKRLVEKVRKLIEDSKRRNRDVLRRVEELVRRVHRRNEEVLRRVEKLVEDIKELLRRG

SEQ ID NO: 22966 - protein, 55 aa, Artificial Sequence
  Synthetic
EEAEREIERLLEESKRSVEEVEERIRRLIRESEESVREVKERIDELLKDADRATK

SEQ ID NO: 22967 - protein, 60 aa, Artificial Sequence
  Synthetic
REVEELVKDVERLMREVHRRNEKVVEEVEALIRKSKEDNERVAREVERLVREVEKMLRRG

SEQ ID NO: 22968 - protein, 55 aa, Artificial Sequence
  Synthetic
REAKERIKDLVRKSRDSVREVRERIRRLLEDSKRSVDDLARRIRELLRKAAEKAR

SEQ ID NO: 22969 - protein, 60 aa, Artificial Sequence
  Synthetic
DEAEELVDRVRKLAEDVHKKNEDVLRESDALVKDSDRRNREALRRVEKLVEDVEELLRRG

SEQ ID NO: 22970 - protein, 55 aa, Artificial Sequence
  Synthetic
EEVKRRIKELLKRVEESVRTVEEELRRLSKESEESVKRVEDRIRELLKRLRDAAR

SEQ ID NO: 22971 - protein, 60 aa, Artificial Sequence
  Synthetic
DEAEDLVRKVRKLIEESKKENEDLLREVRELVARVHEENERVLREVEKLVEDIRRLLRRG

SEQ ID NO: 22972 - protein, 55 aa, Artificial Sequence
  Synthetic
REVKKAIEDLLKESEDSVREVEEEIRKLLKDLEKSVRDVERAIEKLLDELRKDTK

SEQ ID NO: 22973 - protein, 60 aa, Artificial Sequence
  Synthetic
REVEELVREAEELVRRVHKRNEDALRRSKKLVEDVHRKNEEVLKRVERLVERIEELLRRG

SEQ ID NO: 22974 - protein, 55 aa, Artificial Sequence
  Synthetic
KEAAERIKRLIDEVRKSVEEVERRAEELSRELRRSVKEVRDALKRLLDDLRRATT

SEQ ID NO: 22975 - protein, 60 aa, Artificial Sequence
  Synthetic
REVEELVKEVRRRVREVHERNRRVLEDSERLVREVHKRNEEALRRSEELIKRVEDMRRRG

SEQ ID NO: 22976 - protein, 55 aa, Artificial Sequence
  Synthetic
ERAEREIRRLLEEVKKSVEDLTRKARKLSRDLERSVREVEERARDLSRRLREKTR

SEQ ID NO: 22977 - protein, 60 aa, Artificial Sequence
  Synthetic
SEVEKLVKDVEDLAREVHKRNKELVDEVRDRVRRVEERNKRVVDEVREEVKKLIDLLRRG

SEQ ID NO: 22978 - protein, 55 aa, Artificial Sequence
  Synthetic
EEAKDRIRELLKRVEESVEKVKRDIERLIERSKESVRRLEERIKELLRELEEAAR

SEQ ID NO: 22979 - protein, 60 aa, Artificial Sequence
  Synthetic
SEVEDLVRKVKKLMEDSDRENKRLVDEVRERVEEVKKRNKEVVDEVRERVKRLEEMLRRG

SEQ ID NO: 22980 - protein, 55 aa, Artificial Sequence
  Synthetic
KDAAEAIKDLIRKSEKSVDEVRREIERLIKESEDSVKRVTDEIRKLLKRLRDTTT

SEQ ID NO: 22981 - protein, 60 aa, Artificial Sequence
  Synthetic
SELEEILKTVKKLVDDHKRLSEEILRRVRKLVEEHKRKSEEILKRVTDLAEDVKDKIRKD

SEQ ID NO: 22982 - protein, 54 aa, Artificial Sequence
  Synthetic
EVEKELDRLLKELERVSRESEKELRRLLKELEEASRESEERLRRLLRDVEEALK

SEQ ID NO: 22983 - protein, 57 aa, Artificial Sequence
  Synthetic
DEIETVKEELKKLLERLEESSRKVERDLEDLLRRSEESTREVEKRLKELLEDVRRKL

SEQ ID NO: 22984 - protein, 56 aa, Artificial Sequence
  Synthetic
VKEVLDRVRELARTHHELNRELLREAEESSREHHRLNEELVDRVRKLVKEVEDRAR

SEQ ID NO: 22985 - protein, 57 aa, Artificial Sequence
  Synthetic
SEIERVKKALRKLLEDSRKSSEDLARELKRLLEESRKSTEKVERDLTDLLREIEEKL

SEQ ID NO: 22986 - protein, 56 aa, Artificial Sequence
  Synthetic
LDTILERVERSSREHHKLNERLLETLRRSSEEHHKRNEELVRRVERLLEEVERRRK

SEQ ID NO: 22987 - protein, 57 aa, Artificial Sequence
  Synthetic
SKIERVKEEIRRLLDTLKKSSETVIREIEKILKESRESSKKVEDDLRRLVREVEKKV

SEQ ID NO: 22988 - protein, 56 aa, Artificial Sequence
  Synthetic
VDKVLRDLEDLVRRHHERNKELLDRVRKSSEEHNRTNEELLKEVERLARKVIKDTT

SEQ ID NO: 22989 - protein, 57 aa, Artificial Sequence
  Synthetic
DEIEEVKRRARELLREATESSKEVAKALDELLERDRDSSRRVKEDLKRLLEEVRRKL

SEQ ID NO: 22990 - protein, 56 aa, Artificial Sequence
  Synthetic
LEKVLRDVEKLMREHHELNRELLKRVEDSSRTSHELNKRLVDTVRKLVTDAAEKAK

SEQ ID NO: 22991 - protein, 57 aa, Artificial Sequence
  Synthetic
SEIEEVDERIKALLKRSTESSKRVEDEARRLMKEDKDSSKEVEDRLRDLLRKVREKL

SEQ ID NO: 22992 - protein, 56 aa, Artificial Sequence
  Synthetic
LKKVLDDLKRSSEEHHRLNEELLKRAEDSSRTSHRLNRKLVEEVRRLVEKVLEEVR

SEQ ID NO: 22993 - protein, 57 aa, Artificial Sequence
  Synthetic
DEIEEVKKTLKKLVEELEESTRRVEEELKKLLKESEDSTRRVEDELRRLLEEVERKL

SEQ ID NO: 22994 - protein, 56 aa, Artificial Sequence
  Synthetic
LDEVLKDVERLVKEHEDLNKELLKKVEKSSRDHHELNKELVRRVEELVREAIKKTT

SEQ ID NO: 22995 - protein, 57 aa, Artificial Sequence
  Synthetic
DEVEKVKEEIRRLLKRLEDSTRDVERRLEELLRESTESSKEVEERLKRLLDEVRKKL

SEQ ID NO: 22996 - protein, 56 aa, Artificial Sequence
  Synthetic
VKKVLEELRELVRKHEELNRKLLEEVRESSERHKKLNKELVDEVKRLAEKITEEAR

SEQ ID NO: 22997 - protein, 57 aa, Artificial Sequence
  Synthetic
KEIEDVKRALEKLLEDDKRSTEELKDRLARLLEDSKRSSDKVIEDLDRLLKEVRDKL

SEQ ID NO: 22998 - protein, 56 aa, Artificial Sequence
  Synthetic
LDEILKRVEDSSRESHKKNEELLRRVRRSSEEHKRLNEELLREVEELVKEIVKEAK

SEQ ID NO: 22999 - protein, 57 aa, Artificial Sequence
  Synthetic
SKIEEVKKALRRLLEDLKRSTDRVKEEAKKLLDESRKSSEEVKRELERLLEEVTRKL

SEQ ID NO: 23000 - protein, 56 aa, Artificial Sequence
  Synthetic
ADKMLRDIERLVEEHKRLNEKLLREVRESSKRHNEKNEELVKTVKKLVEDAEERAK

SEQ ID NO: 23001 - protein, 57 aa, Artificial Sequence
  Synthetic
SEIETVKKELERLLDESRRSTETVEREVEDILRKSTESSEEVKDRLDKLLKEVRDKL

SEQ ID NO: 23002 - protein, 56 aa, Artificial Sequence
  Synthetic
LREVLERVRKSSEDHKELNKELLERLRRSSKEHNDKNKRLVDEVRRLVEEVIRRAT

SEQ ID NO: 23003 - protein, 57 aa, Artificial Sequence
  Synthetic
REIEEVKERLKKLLKDVTDSTDKVRKDLEKLLEDDRRSSRKVEEDLRRLLKDVRDKL

SEQ ID NO: 23004 - protein, 56 aa, Artificial Sequence
  Synthetic
LEKVLREAEKLAREHERTNEKLLKDVEKSSRDSHKRNKEIVDRVKKLAEDIIRKTK

SEQ ID NO: 23005 - protein, 57 aa, Artificial Sequence
  Synthetic
SEIERVKKRLEELLREVEESTRRLEERLKRLLEEAKRSSEEVEKELRRLLEEVRRRL

SEQ ID NO: 23006 - protein, 56 aa, Artificial Sequence
  Synthetic
LDDVLRRVEELAKRAHDENERLIREVEELVRRHNKRNKELVDEVKRLVEKVIEEER

SEQ ID NO: 23007 - protein, 57 aa, Artificial Sequence
  Synthetic
DEIERVKEELERLAKEDKDSTDTVKRELERLLEESKRSSDKLREDVERLLREVRERL

SEQ ID NO: 23008 - protein, 56 aa, Artificial Sequence
  Synthetic
LKRILEEVKRSSEESHKLNEELLDEVRKSSEEHNKLNEKLLRDVERLVRKVLTETK

SEQ ID NO: 23009 - protein, 60 aa, Artificial Sequence
  Synthetic
DELDKLLRDAEEVVRRVKEENKRLVKRDEEVVRRIHELNRKLLEDIRKVVEDVKEEIKEG

SEQ ID NO: 23010 - protein, 62 aa, Artificial Sequence
  Synthetic
EDAKRKVKRVKDELKRLVEEVEEVSRRSEERSRKTLEDVRDSSRRLEEELRKLVKEVEEAVR

SEQ ID NO: 23011 - protein, 60 aa, Artificial Sequence
  Synthetic
DELEKLLEDIRDVVRRIKETLEKLVKEDRDVVEKVKEDNKRLLKEMEDVVRKVKEEIRSG

SEQ ID NO: 23012 - protein, 62 aa, Artificial Sequence
  Synthetic
ERLERRAEEMEERLRRLVEEVREVVERVKEESDRTVEEVRRSSDRVEKEVERLVREVEDKVR

SEQ ID NO: 23013 - protein, 60 aa, Artificial Sequence
  Synthetic
EELERLMRRSEESLKRSEDTVRELIREAREILKRIKEELKRLLEEAERILEEVKKTVRDL

SEQ ID NO: 23014 - protein, 55 aa, Artificial Sequence
  Synthetic
KDLIKTARDTLRESERVSKELEERLKKIVEEVERLVEEVKKELERIVKDAERDVK

SEQ ID NO: 23015 - protein, 60 aa, Artificial Sequence
  Synthetic
DELRKLARDAEEILKRSEEEVRKLKKRSDDSLRRSREEVKKLEDEIREIVDRIKKRVEER

SEQ ID NO: 23016 - protein, 55 aa, Artificial Sequence
  Synthetic
EELKRTLEEIVERSKRVSDRLRERLKRTLDDSRRISDDLRRRLKKLVDDIRREVK

SEQ ID NO: 23017 - protein, 61 aa, Artificial Sequence
  Synthetic
KEIEDVKEELKKVLEEDRDSLRKVEKEHRRLAEEVKRKVRELEESLKRIVEEVERIAREAK

SEQ ID NO: 23018 - protein, 56 aa, Artificial Sequence
  Synthetic
LETVIREVRRILEESKRLNDKSREEVRKLVEELKDIVRRIEETVRRLLEEAKERLR

SEQ ID NO: 23019 - protein, 60 aa, Artificial Sequence
  Synthetic
DSVDRLRRRVDEVLKTVEDALRRNKKDAEDLLRRIEEVLERLERRSEKLLKEIDEVLKRV

SEQ ID NO: 23020 - protein, 59 aa, Artificial Sequence
  Synthetic
DEILTRAVEEIDELLRKLKRELDESTKESRKRVEELEKRLRDNTKRVKKDVDDLKRRVS

SEQ ID NO: 23021 - protein, 57 aa, Artificial Sequence
  Synthetic
SSIERLEEESRKNIKELEDSVKELKEEVDRLVEELERSVRELAKIVEDVVRELKKRA

SEQ ID NO: 23022 - protein, 59 aa, Artificial Sequence
  Synthetic
DEEVKRVLEESHRLVREVHERNKRVAERVRDLVRRVHEENERVAEEIRDLVRRVEEEVR

SEQ ID NO: 23023 - protein, 60 aa, Artificial Sequence
  Synthetic
SEIEDVVKKLRDLSERNVRDIDRLVKEIDELLKRDKEEIKRVVDDIKRRVREIKKIIEED

SEQ ID NO: 23024 - protein, 59 aa, Artificial Sequence
  Synthetic
KEMLDRLRKVVDELVKENKKAVEDLKKRVEDVIRESKRVVEEARRVVDELKKELRDELK

SEQ ID NO: 23025 - protein, 60 aa, Artificial Sequence
  Synthetic
SEIEKLVEEAKRLVKEAEDRLRKLSKESEESVRRVVKTLKDLVRELERLVEEVRKIIERN

SEQ ID NO: 23026 - protein, 62 aa, Artificial Sequence
  Synthetic
DEMRKRVKELEEAVKELTKEIKEVVDRHRETVERSSRKVKTVLDDLRRVVEEILRRVEDAAR

SEQ ID NO: 23027 - protein, 60 aa, Artificial Sequence
  Synthetic
KKIEDLVEEIKRLSDENRRRVERLSEDSKRSLEENKKKLKELVERIKKLLEEVSDKIRKD

SEQ ID NO: 23028 - protein, 62 aa, Artificial Sequence
  Synthetic
EEAEERLRRAEDTVRRLVERNREVLEEHERTLRRSSEESKRALKEVERVVREVLKRVDEELQ

SEQ ID NO: 23029 - protein, 60 aa, Artificial Sequence
  Synthetic
DELEKLVRDLEKRVKEVKDELKRSSEESERSLDEVRKTLKKLVEEMRELLKEVKRIIERN

SEQ ID NO: 23030 - protein, 62 aa, Artificial Sequence
  Synthetic
EEARERLERLRKRVEELLREVEKALEDDEKTVRESSKRIKKVLKELEDTARELVKEVRETAR

SEQ ID NO: 23031 - protein, 60 aa, Artificial Sequence
  Synthetic
SELEKLVRDLERLSEDNKRRLKESSKESKESLDRVRETIKRLVEEAEELLKRVVDTIRRT

SEQ ID NO: 23032 - protein, 62 aa, Artificial Sequence
  Synthetic
EEARERLERLREKVEELARDNERALREDERTVRESSERLRKVLEEAKDRIDKLVKAVEDAAR

SEQ ID NO: 23033 - protein, 60 aa, Artificial Sequence
  Synthetic
SELEKLVEEAKRLSDKNEEDLRRSSRESRESLKENKERIERAVKRLADLVRDVKEKIKRT

SEQ ID NO: 23034 - protein, 62 aa, Artificial Sequence
  Synthetic
EEMKERLERLRDTLKKLKERNKEVLREDRETVTDSSRRSEEVVREAEERVERLLREVEEAAR

SEQ ID NO: 23035 - protein, 60 aa, Artificial Sequence
  Synthetic
DELEKLVRELEELVKRVKEELERSSKESEDSLRDVKKKIEDLERKLDKLLKEVTDEIRRN

SEQ ID NO: 23036 - protein, 62 aa, Artificial Sequence
  Synthetic
DEMRKRLEDLERKVRDLARRVEKALEEDERTVRESSKRIRELLKRLEDKVRKIEKDVDDARR

SEQ ID NO: 23037 - protein, 60 aa, Artificial Sequence
  Synthetic
SELERLVREVRELSDDNRRKLERSSRESERSAKEVERTLEKLVKELRELVERVKRDIERV

SEQ ID NO: 23038 - protein, 62 aa, Artificial Sequence
  Synthetic
EEMKERLKELEKEADDLRRENEELLDRDRRTVEESSKRVEKALRDLEREVRRILREVEETMR

SEQ ID NO: 23039 - protein, 60 aa, Artificial Sequence
  Synthetic
SKLERLVEELKRLSDENVKDLERSSRESEESLKRNKEEIERVVERLRELLEKVVRDIKDD

SEQ ID NO: 23040 - protein, 62 aa, Artificial Sequence
  Synthetic
EEAKERLDRLREAVEKLREDNKRALDRDRETVERSSKKSEDAVRRAEEDVRRLTETVRRAKK

SEQ ID NO: 23041 - protein, 60 aa, Artificial Sequence
  Synthetic
SEIEDLVRKLRELLRDVKKKLKESSKRSEDSLRRVKEEIDKLVEELKKLLDEVKKEIERT

SEQ ID NO: 23042 - protein, 62 aa, Artificial Sequence
  Synthetic
EEAEKKMRELEEEVKKLLEEVDRALKDDERTLRKSSKDIKKVLDDLRRTVKKLKEDVEETMR

SEQ ID NO: 23043 - protein, 60 aa, Artificial Sequence
  Synthetic
DEIERLVEELRKLSERNKRELDRSSEESRESLKRVKEELKKIVEELRRLLEEVKDRIRKD

SEQ ID NO: 23044 - protein, 62 aa, Artificial Sequence
  Synthetic
EEARERAKRLEKEVRDLAKENEKALEEDERTVRRSSEEIADLLRKVEKVVRELLEEVRRAAK

SEQ ID NO: 23045 - protein, 60 aa, Artificial Sequence
  Synthetic
SSLEDLVRRARELSDRNREKLKRSSDESRESLKRNEEEIRRLVEELRELLERVRDLIRKL

SEQ ID NO: 23046 - protein, 62 aa, Artificial Sequence
  Synthetic
EDAKRDLDRLRREVERLIRDNERLAEEDARTVEKSSRDSKKLVEDLEREVEKLRREVERDRK

SEQ ID NO: 23047 - protein, 60 aa, Artificial Sequence
  Synthetic
SSIEDLVRRLRELSKRNTEELKRSSEESEDSVREVEDRVRELVKRLRELLKRVEDLIRKI

SEQ ID NO: 23048 - protein, 62 aa, Artificial Sequence
  Synthetic
EEMEKRAKELEEEVRDLTRRNEDALRRDRDTVKRSTERVDKVLKDLEREVRDIKRRVDEATK

SEQ ID NO: 23049 - protein, 60 aa, Artificial Sequence
  Synthetic
RELDELVKELRKLVEEVKDELRKSSKTSKELVEEIKERLERLVRELKRLVDEVRKTIRRL

SEQ ID NO: 23050 - protein, 62 aa, Artificial Sequence
  Synthetic
EDARRKLEELKETVRELLREVEKALDEDRETVKRSSEEVEEMLKDLRRRVTELDERVEREAT

SEQ ID NO: 23051 - protein, 60 aa, Artificial Sequence
  Synthetic
DEIEKLVEDAERLSRENEKRVRKSSEESKKLVKEALDELKKLVEELEKTVRDVDREIERN

SEQ ID NO: 23052 - protein, 62 aa, Artificial Sequence
  Synthetic
EEAKKRMEDMERRVRELEKRNKKVLDEDRETVRKSSKDLEDAVRELEERVRRLAKKVKESAD

SEQ ID NO: 23053 - protein, 60 aa, Artificial Sequence
  Synthetic
RELEELVKRLRELSRENEERLRRSSDESRKLLERNKERVKKVVDDLRRLVEEVKKEIERD

SEQ ID NO: 23054 - protein, 62 aa, Artificial Sequence
  Synthetic
DDARRRLKELEEEVKRLAKRNEDLLREDERTVRESSRRSEDVVRRAEEMVRRLLEEVERARK

SEQ ID NO: 23055 - protein, 60 aa, Artificial Sequence
  Synthetic
SELEKLVDELRKLSDENRRRLEKSSRDIEKLLKEIRDRIEELKKEIEDLLKEVKERIERL

SEQ ID NO: 23056 - protein, 62 aa, Artificial Sequence
  Synthetic
EEAEELLRRLEKRVEELARENEEMLKRDEDTVEEVRKRVTDVLRELKRVVEEVRRKVEEEAK

SEQ ID NO: 23057 - protein, 60 aa, Artificial Sequence
  Synthetic
SKLEKLVKDAEELSRRNEEELRRSSDESRKLLEKNKRRVERLVEELRKLVKKVRDDIRRE

SEQ ID NO: 23058 - protein, 62 aa, Artificial Sequence
  Synthetic
REAEELLRRLEEMLRRLTKKNRELLRRDEETVRRSSKRSEEVVRRAEEEVERLVKDVEDTRT

SEQ ID NO: 23059 - protein, 57 aa, Artificial Sequence
  Synthetic
KDEERAKKVVEEIKKRVTEIVRRHHKTNEDLVRRVRESSEKHHRRNEELKERVTRKI

SEQ ID NO: 23060 - protein, 56 aa, Artificial Sequence
  Synthetic
IETLVRELEELLKRLEDEVRRLTKRSKEVIDRIHKLNEDLTRESERVLKEVEDRDR

SEQ ID NO: 23061 - protein, 57 aa, Artificial Sequence
  Synthetic
RETEEVKKELDKLVEEAERAVREHHKENDRLVKRLEEVIRRHEKSVRELVEKVRREV

SEQ ID NO: 23062 - protein, 56 aa, Artificial Sequence
  Synthetic
LEKIVRRARELVERLKERLKELTRRSEELVKDLERKIERLSRELARIVKEVLDRDK

SEQ ID NO: 23063 - protein, 57 aa, Artificial Sequence
  Synthetic
SREEEAKKRLEELLREVEKVVRDHHRENEKIREEVERVVEKHKKRNRELVEAVRKRI

SEQ ID NO: 23064 - protein, 56 aa, Artificial Sequence
  Synthetic
VREAVERLKEIVERVRRKVEKLTEDSRRVLEELKRRIEKLTRDSERVLKEIEDRTR

SEQ ID NO: 23065 - protein, 57 aa, Artificial Sequence
  Synthetic
SDKEEVKKEIKKLKEDIKRAVDEHRKVNKRILEEAEKSSREHEKENRDIVRRVREEV

SEQ ID NO: 23066 - protein, 56 aa, Artificial Sequence
  Synthetic
IKEVVKELKKILEKLKRELEDLSRKSEDVLRRLHELNKRLTDDSRRVLDEVREDTK

SEQ ID NO: 23067 - protein, 59 aa, Artificial Sequence
  Synthetic
SEVDRLLKELEDVLKKVEDDIRRHIKRNEDILRESKKLADKLITEIEDMLRKVEEMIRN

SEQ ID NO: 23068 - protein, 59 aa, Artificial Sequence
  Synthetic
EEAVKRLEDTARRVEEEVRRLIRELEDTSRRVLEESRKISKELDERLRRVIEEVEKAAK

SEQ ID NO: 23069 - protein, 59 aa, Artificial Sequence
  Synthetic
SELEKLIKEIRDILKESEDAIKENLDRNEEALKRVAEEIKRLIDELRKMLEDVKRMIRD

SEQ ID NO: 23070 - protein, 59 aa, Artificial Sequence
  Synthetic
RRAVERVREELEKVIRDSRKLSRDLEEASRRVEEDVRRLIEELERRLKEVIKAVEDAAR

SEQ ID NO: 23071 - protein, 59 aa, Artificial Sequence
  Synthetic
DEVEKLAEELREILKRSEEMIRENLKRNRDLLRRSKEEVDKLKDELEEMLRRVRRVIED

SEQ ID NO: 23072 - protein, 59 aa, Artificial Sequence
  Synthetic
RELVKDLERKAREVIRTSEELSRRLAKTSEEVLEESERVVEELERRAERVEEEITKAAK

SEQ ID NO: 23073 - protein, 59 aa, Artificial Sequence
  Synthetic
SEVEDLLRKLEEILRRSKENVERNVRENREMLKKVEKTIRDLIRRAEKLLREVEEAIRN

SEQ ID NO: 23074 - protein, 59 aa, Artificial Sequence
  Synthetic
EDAVRRLEKELERVIKTSRDISERLERESRRVEEEVRKLIEELSRRLEEVRERVKEATR

SEQ ID NO: 23075 - protein, 59 aa, Artificial Sequence
  Synthetic
REVEEALKDLERILKESEDNVRRNIKKNEDLLRRVEERIRELLDEARRLLERVKEVKKD

SEQ ID NO: 23076 - protein, 59 aa, Artificial Sequence
  Synthetic
KDLVERLKEELERVTRDSRRVVDELRKRSEKVREDVRRLIEDLRRRLEKVIRDVEEDAR

SEQ ID NO: 23077 - protein, 59 aa, Artificial Sequence
  Synthetic
DETERIIRDLERVLEEIARLAKKNIDDSRRVLKELAEKLKRDSERAKKLLEDVEEIIRR

SEQ ID NO: 23078 - protein, 55 aa, Artificial Sequence
  Synthetic
EDVDRVVRKVLEDLRRLLEEVKKVNDDSEKEVRRLLEENERKNRRVEEEVKKLLK

SEQ ID NO: 23079 - protein, 60 aa, Artificial Sequence
  Synthetic
SELEDIIRRIEEVLKRNEELNRKNIKESRDLLEEIRRKAKEDSDRVKEVLRRLEDEVRRN

SEQ ID NO: 23080 - protein, 55 aa, Artificial Sequence
  Synthetic
EEVKRKVDKVVEDIKRVSEESTRANDESRRALEKVVKENEDTNREVVKRVRDAEK

SEQ ID NO: 23081 - protein, 59 aa, Artificial Sequence
  Synthetic
SELEEIIDRIRTVLERNRELNERNIRESKRLLDEIKKRVEDDNERSKDIVRRVETEVRE

SEQ ID NO: 23082 - protein, 55 aa, Artificial Sequence
  Synthetic
ERVDEVVEKVLDEMRKVSRTSEESNRKSEEEVRKVLKENNDMNRESVERLRRTEE

SEQ ID NO: 23083 - protein, 60 aa, Artificial Sequence
  Synthetic
DEVRRVIEELERLLEENRRHSKEDNERSKKINKENHDHSKESTDRAEKLLREVEKLIRET

SEQ ID NO: 23084 - protein, 58 aa, Artificial Sequence
  Synthetic
DRVRDVDRTVKRVVKESRRSTRENEKTNTDVVRSTDESLKEDKKEVDRVIEELDRAVR

SEQ ID NO: 23085 - protein, 60 aa, Artificial Sequence
  Synthetic
SEAEKVIEDAKRLLKENEDHSKEDNDRVRELLEEVKRHSEESTRRAEKILEEIRELVEKV

SEQ ID NO: 23086 - protein, 58 aa, Artificial Sequence
  Synthetic
EEVKRVEDEVRKLVKASRESTERNERTNREVAERLKKSLEEDRERVRKVVEDLRRAEK

SEQ ID NO: 23087 - protein, 57 aa, Artificial Sequence
  Synthetic
DELRKVLKESEDSLERLRRTLEESIKRSRDSLRENTELVKDSLRRSEESLERVEKSN

SEQ ID NO: 23088 - protein, 59 aa, Artificial Sequence
  Synthetic
KEMLKRLEDEIRRSIEELRKALRRVEEEHRKVIEASKDLVRRLEEAHKEVIDRLKEKLR

SEQ ID NO: 23089 - protein, 55 aa, Artificial Sequence
  Synthetic
DEIERVIEESRKSLDDLRRKAEESIRRSEESLREVEERLKRSIREAEESLKKVEN

SEQ ID NO: 23090 - protein, 59 aa, Artificial Sequence
  Synthetic
DEVVRELKKMIDKSERDLEELLDRVRRKHERVIEELKKLLKRVKDAHERVIRELEKTRK

SEQ ID NO: 23091 - protein, 59 aa, Artificial Sequence
  Synthetic
SEVEDLIRRVRKSNKESEDVLRESIERSEESNERSERTARRIIEEAERILEEMEESLKK

SEQ ID NO: 23092 - protein, 59 aa, Artificial Sequence
  Synthetic
EEVVRRLEEEVKRVAEHTRKLLKDVRKKHEESIRHSEEVLDRLEKKLREIMKRVTERTK

SEQ ID NO: 23093 - protein, 59 aa, Artificial Sequence
  Synthetic
KEVEDIIEDVKRSLEESKRMADKSITDSRRSNEESKRIVEEIKRKIDEILERIERKARK

SEQ ID NO: 23094 - protein, 59 aa, Artificial Sequence
  Synthetic
EKVVRELEKRVKEVVKTTEDVLREVERTHRESIKHSEDLVRRLEERLRRVAKEVERTRK

SEQ ID NO: 23095 - protein, 59 aa, Artificial Sequence
  Synthetic
SEVEKAIKEARDSLRESKRLLEESIKRSEDSLEESRRVVEEIKKRLEELLREVKESVDQ

SEQ ID NO: 23096 - protein, 59 aa, Artificial Sequence
  Synthetic
EKKVRDLERMVKRVMEETEKALEDVERRHEKSIRDTRRVLKELEDTVRKVLKEVDRERQ

SEQ ID NO: 23097 - protein, 59 aa, Artificial Sequence
  Synthetic
SKLEKVITEVRDSLRRSRKMAEDSIRRSEELLKELEDLLKKVRDTLRKILKDIEDLARK

SEQ ID NO: 23098 - protein, 59 aa, Artificial Sequence
  Synthetic
KELVDDVRREVEKVVEDTRRVLEEVERTHKESIDRLRKLVERVRREIEEIARRVKETRD

SEQ ID NO: 23099 - protein, 60 aa, Artificial Sequence
  Synthetic
SVVEKLKDEADKLVKRNEDLARRLEEVSKDTIDRLEDVLRKLREVLKRLRRRLEEVLKRV

SEQ ID NO: 23100 - protein, 59 aa, Artificial Sequence
  Synthetic
REKFEEVIKRLRDSSKRSEDKIRKVLKDSRDLLEDVRRKIEDVIRRMEKLIKEVEDRVR

SEQ ID NO: 23101 - protein, 60 aa, Artificial Sequence
  Synthetic
SVVEELERVMRELKKRNEELSRENHESVKEAEKRNKRLSEELEKVSRDVIKDLERVVEEV

SEQ ID NO: 23102 - protein, 59 aa, Artificial Sequence
  Synthetic
EREIRRIIEELKRLSDENEERIRRISEEIKDLSRRNEETVRRVIEENRKLLEDATRRTK

SEQ ID NO: 23103 - protein, 60 aa, Artificial Sequence
  Synthetic
SLREKLKEVIRRLEEENRRVSEENHRSVREVEEENRKVSDELRKVAEELKRRLEEVVRRV

SEQ ID NO: 23104 - protein, 59 aa, Artificial Sequence
  Synthetic
SREIEDIIRRVKKLSKENKETIERISREIRELSKRNEEEVRRVIRRLEELLEELERTAK

SEQ ID NO: 23105 - protein, 60 aa, Artificial Sequence
  Synthetic
RVIEKAEEVVDRLKKRNKEVLKENHDSVREVEKENRELLEKAEKVVRELEERLKEVVEEV

SEQ ID NO: 23106 - protein, 59 aa, Artificial Sequence
  Synthetic
EREIERIIKEAEELSKRNEEVIDEISKRIKELSERNRERVEKVIEEAKELVKRVTDKVK

SEQ ID NO: 23107 - protein, 60 aa, Artificial Sequence
  Synthetic
KDEEKAEDVVRRLTEEVRRVHEKTRDVVRRVTERSNDVSRRSKEEVRELLERADDLARKG

SEQ ID NO: 23108 - protein, 56 aa, Artificial Sequence
  Synthetic
VEDLIRELKRLVDELRERSEDLIRKAERVLERLEEESRRLLKELRDLLEDVTRKAE

SEQ ID NO: 23109 - protein, 60 aa, Artificial Sequence
  Synthetic
SETEKAREVVRELEKRNDEVHKETRDVVRRLEETSDEVSKDSERKVDRLREEVKKVRDDG

SEQ ID NO: 23110 - protein, 56 aa, Artificial Sequence
  Synthetic
VEELIRRMEKLTEDNERRSRKLIEELKRLLEDLREKSERLIRELERLVKELRDRAE

SEQ ID NO: 23111 - protein, 60 aa, Artificial Sequence
  Synthetic
SEKEKAREVVKKLKKRVDEAHKKTKDVVEELRKRNRDVHRTTREVVRDLLKKVKDVERRG

SEQ ID NO: 23112 - protein, 56 aa, Artificial Sequence
  Synthetic
VETLIERLRELIDELRRRSEKLIKELREVTKRNKERSDRLIKELEDLVKKLKDDAT

SEQ ID NO: 23113 - protein, 59 aa, Artificial Sequence
  Synthetic
DEVEKLIEDLKRIVERDEREIRELIKELDDHVRKDEKIARDLERRLKEILDEVRKMVTD

SEQ ID NO: 23114 - protein, 59 aa, Artificial Sequence
  Synthetic
KELLEKVKRVLEEVRRRSRETLERLREVLERSIRDSERTLEKVREMLERVRKEIEKLRK

SEQ ID NO: 23115 - protein, 59 aa, Artificial Sequence
  Synthetic
SEVEELDKRLRDHVRRDEEIVERLIRELKRHVERDREEARRLIEELRRLLEEVKRMMED

SEQ ID NO: 23116 - protein, 59 aa, Artificial Sequence
  Synthetic
RKLVRDVEKSLEESIRRSEETLKTVKDVLDKSKEDSKRTVEDVERVLREAEKEAKRATD

SEQ ID NO: 23117 - protein, 59 aa, Artificial Sequence
  Synthetic
SEAEKLIKELEDHVKRVEDRARELIDELRKHVEEDERRARKLIEELRRLLKEVKRMVDD

SEQ ID NO: 23118 - protein, 59 aa, Artificial Sequence
  Synthetic
EDLVRRVRKVLRRSEEDVRRLIEEVERVLKRSEEESRRTIREVEEVLKEVERAVEELAR

SEQ ID NO: 23119 - protein, 60 aa, Artificial Sequence
  Synthetic
SLEDRVREVVERSERDLRRSTDEIRRVVEEAEKALRRLVREVEEVVREVKERLERVVREG

SEQ ID NO: 23120 - protein, 59 aa, Artificial Sequence
  Synthetic
EDTVRKVIEDSDRSLEENKRLVKKVIDEIKERLKEMKKRAEEIIERLKKLLEEVEERAR

SEQ ID NO: 23121 - protein, 60 aa, Artificial Sequence
  Synthetic
DLTKRVEEVVRRSRERLERSTRDIKRKAEEVKERLKKSSKEVEKVIREVETELERLRREG

SEQ ID NO: 23122 - protein, 59 aa, Artificial Sequence
  Synthetic
EKKVEEVLRRSEKSVRDNKKRVEEVAETLKKILTDNRRLVKRVKEELDKLIRDVEERAR

SEQ ID NO: 23123 - protein, 57 aa, Artificial Sequence
  Synthetic
SEKEDVERVVERVKREADELLKENHKSVKDVDERVKETVERNHRSVRKAEEDVKRVE

SEQ ID NO: 23124 - protein, 56 aa, Artificial Sequence
  Synthetic
VREVAKELEDIVRRIKELVERSNRELKKIVEDNERVVEESDRRIKEILERITEASR

SEQ ID NO: 23125 - protein, 57 aa, Artificial Sequence
  Synthetic
SEKETVEEVVDKVRRDLDKSLEDNHKSVEEVRRRVEKTLRENHESVERARKRARDLE

SEQ ID NO: 23126 - protein, 56 aa, Artificial Sequence
  Synthetic
VREVVERAKRILEDNKKKIDESNERLERIVRENKEMVERSDRRIEEIVERIERETR

SEQ ID NO: 23127 - protein, 57 aa, Artificial Sequence
  Synthetic
DEKEEVEKRAEEVRKKVDKLLKENHESVEDARRRVDKTLRENHESVEEVKRRVDEVR

SEQ ID NO: 23128 - protein, 56 aa, Artificial Sequence
  Synthetic
AEDVMEELDRLVEDLRRKVEDSNRKIKRIVDENKREVEKSNRKLRELLKELEDRAR

SEQ ID NO: 23129 - protein, 57 aa, Artificial Sequence
  Synthetic
SKKEDAERVVREVTREVRRLLKENHDSVREVLKRVDETVERNSRSVKEVLRKVREVE

SEQ ID NO: 23130 - protein, 56 aa, Artificial Sequence
  Synthetic
LKEVVDRARDLIRDLTRKVKESNERLEEIVERNEREVRKSDEDLKRLADDLERKAT

SEQ ID NO: 23131 - protein, 57 aa, Artificial Sequence
  Synthetic
REKEEVERVVEDVRRRLDESLERNHKSVRDALREVDRTVEENSRSVEKVRKRLKEVE

SEQ ID NO: 23132 - protein, 56 aa, Artificial Sequence
  Synthetic
VREVKKELEKIVRDNERVVEDSNDKIRRIVTKNTEDVKRSDETLERIVEEIERRAR

SEQ ID NO: 23133 - protein, 57 aa, Artificial Sequence
  Synthetic
KEKEDVERKVEDVKRDVDRVLEENHRSLKEAEERSNKLSDTSRRVAKRVVDDVRRLK

SEQ ID NO: 23134 - protein, 56 aa, Artificial Sequence
  Synthetic
VKEVVDRLEKIVRDIRKEIERSNRDVERLVRTLEEVSKRIIDTLERIIDKIREDTK

SEQ ID NO: 23135 - protein, 59 aa, Artificial Sequence
  Synthetic
SEAEELIEELERIAEEDRKLVEDSIRKLRKILDEDRKIMKRLAEELDRILEDVKRKVDK

SEQ ID NO: 23136 - protein, 55 aa, Artificial Sequence
  Synthetic
KELEEVVRKVKRESDRTLEKSKKVVDEVRRRSEETLEKLRRVVERVRKRVDEASK

SEQ ID NO: 23137 - protein, 60 aa, Artificial Sequence
  Synthetic
DRADELRERLKEIMERDRRIMKELEDELRELVERDERIIRELERRLEEIVKDVERKAKSG

SEQ ID NO: 23138 - protein, 55 aa, Artificial Sequence
  Synthetic
DELRRVVEEVEKDSERTLKELRRVVKEVEERVEKTLRDLEEVLERVKERVKRLKD

SEQ ID NO: 23139 - protein, 59 aa, Artificial Sequence
  Synthetic
KEAEDLMREVEELVRRDEEIIKRLADELEEIVDDNRRKVEDLVRRLEEILRRVEESMRK

SEQ ID NO: 23140 - protein, 55 aa, Artificial Sequence
  Synthetic
KELREVIERARKRVEETLRELERKLEEVRKTSEDLLRRLEEVVKRVKEEVEKLEK

SEQ ID NO: 23141 - protein, 59 aa, Artificial Sequence
  Synthetic
SEMDELRKELEDLARDDKRRVEESIRRLEKIAEDNERLARESIKRLRRLVTELEKLARK

SEQ ID NO: 23142 - protein, 55 aa, Artificial Sequence
  Synthetic
KELKEVVDRVREIVKKTLEESREVVKKVREDSKRLLEESKRVVEEVKKRVEELKK

SEQ ID NO: 23143 - protein, 59 aa, Artificial Sequence
  Synthetic
DEVEEVKEELKRTSRDDERKVEEIRKRLEESTRRLRELAEELKDELRKSSRDLERLRRE

SEQ ID NO: 23144 - protein, 55 aa, Artificial Sequence
  Synthetic
REVERALERSLKRSDETVKEVEELLRRSLEDSKKLLEEVREALERSKKRSDELRR

SEQ ID NO: 23145 - protein, 59 aa, Artificial Sequence
  Synthetic
KEVEDVKEELRRSSKKLRELAERLKKLLEDILDEDRKLAEEIKKRLEDSSRKIEELKRR

SEQ ID NO: 23146 - protein, 55 aa, Artificial Sequence
  Synthetic
DEVERMLKESDKESKRLLEEVDRMLKEVIKASKKSLDDVDRVLRRSERESEKRRK

SEQ ID NO: 23147 - protein, 59 aa, Artificial Sequence
  Synthetic
SEVEKVKEELRESSRALRKLVEKIRRILRETSERDRDTVREIADRLRKSSRRVEELKRN

SEQ ID NO: 23148 - protein, 55 aa, Artificial Sequence
  Synthetic
DEVRRVLEESERRSKKLLDEVEELLRRSERTSRESLKEVKERLRKSLEESERRAR

SEQ ID NO: 23149 - protein, 60 aa, Artificial Sequence
  Synthetic
SLVERLKKVVEDAERELRRLTKETEDVLREAEETIKRLSERLKKANEDTERKIRRLAKEN

SEQ ID NO: 23150 - protein, 59 aa, Artificial Sequence
  Synthetic
EKKIDDAIKRIRDLIERVEEINKEVVDRIKELIERVEEINETVIRDSERLIKEVEDEVR

SEQ ID NO: 23151 - protein, 60 aa, Artificial Sequence
  Synthetic
SLEEDLRRVLEEVKRELKELSKRSKEVNRKTEETARRLSEKSEKVNRETKKRVEDLMREN

SEQ ID NO: 23152 - protein, 59 aa, Artificial Sequence
  Synthetic
EKAIRDAIRRLKELVERVKRTNEEVVKESEELIERVRERNDDAVRKSRRLIERLTEKVK

SEQ ID NO: 23153 - protein, 60 aa, Artificial Sequence
  Synthetic
SLKETLEEVLKEVKRRIEDLSRRLEEVLRRAREELKRLSDDSRRVVEEAEERVRRLMEEN

SEQ ID NO: 23154 - protein, 59 aa, Artificial Sequence
  Synthetic
KEEIKRVIDELRRLIEEVEKRNREVVEEIKRLIKEVADDNRRALERIRRLIRKLEEEVK

SEQ ID NO: 23155 - protein, 60 aa, Artificial Sequence
  Synthetic
SLTERLREVLKKVEDTLRKLSERLRDVLRKAEKTIEEISRRSEEANRETKERAERLMEEN

SEQ ID NO: 23156 - protein, 59 aa, Artificial Sequence
  Synthetic
KDRIEDVIRELDRLLEEVRRINEEVLRRIEELIKRVKEENDRVMETSRRLIETVKEEVK

SEQ ID NO: 23157 - protein, 60 aa, Artificial Sequence
  Synthetic
DKVRKILKEMRDLVRRNKEEIDRSIRKIEELIERNKREIDKSIEELKRLLDEVRKIVKDE

SEQ ID NO: 23158 - protein, 58 aa, Artificial Sequence
  Synthetic
EMVRDVARVVKEVHDDNRRLTEKSERVVREAHRRNEEIVKASEEAVREAKRRLEELRR

SEQ ID NO: 23159 - protein, 60 aa, Artificial Sequence
  Synthetic
DKVREILKRLEDLVRTNKERIDESIEELERLADENRRRIKKSIDDLRRLIEEVERIVKDR

SEQ ID NO: 23160 - protein, 58 aa, Artificial Sequence
  Synthetic
EVVRDVERVLEEVDRANRDLVRRSKEVVDKVHETNKKLVEESKEAVDRVTELLERARK

SEQ ID NO: 23161 - protein, 59 aa, Artificial Sequence
  Synthetic
DEVEELVKKLEKVLREIEEMSERLSDENRKVLEKIKEDSKRLNEELERVLRRIREASRD

SEQ ID NO: 23162 - protein, 59 aa, Artificial Sequence
  Synthetic
SELLERLREVLEDVKRKLDEIHRRNEESLERLEREVKRLNEDNRRSLKTVDDRLRETKR

SEQ ID NO: 23163 - protein, 60 aa, Artificial Sequence
  Synthetic
SEKEKLDAVLREVEEAAKKNIDKNRRSLEEVAEVVRELVKENRKSLEEVKEMIERIIREI

SEQ ID NO: 23164 - protein, 56 aa, Artificial Sequence
  Synthetic
VEKIVEDLKRVLEESHKLSEDVDRLIKRVVEEAKKLSRDVNEDVKRVVKEVKDEAD

SEQ ID NO: 23165 - protein, 60 aa, Artificial Sequence
  Synthetic
SEKEKLDDVLRKVKDTLAENIKNNKESLDRVREEIERNIRRNEESLDRARRTVEKIIEEI

SEQ ID NO: 23166 - protein, 56 aa, Artificial Sequence
  Synthetic
VEKLVEELRRLLKESHELSREVNDRLRRALEESHELSKEVNETLRKLLEDIRREAK

SEQ ID NO: 23167 - protein, 60 aa, Artificial Sequence
  Synthetic
KDEERLKKVIDEVRKRVEENIRTNEDSLRKAEETLKRNIRKNEKSLEDARREIEELIREI

SEQ ID NO: 23168 - protein, 56 aa, Artificial Sequence
  Synthetic
VEKLIKKLRDLLEESHRLSEEVNRTLKRALDESHERSKEVDKRIEEMVERVRRKVK

SEQ ID NO: 23169 - protein, 60 aa, Artificial Sequence
  Synthetic
SEREKLEKVLEEARREIERLAEENRRSLDRARKEVKRLIDNNRKSLDDVRKRVDKLVKDI

SEQ ID NO: 23170 - protein, 56 aa, Artificial Sequence
  Synthetic
VEKLVEELKKVLDDVRKESERVNRTLKKLLEDIERLSREVNKRIKEMVRKATEDVR

SEQ ID NO: 23171 - protein, 60 aa, Artificial Sequence
  Synthetic
SEKEELDKVLKEAEDKIEENIRDNERSLRDVERAVRRIIENNRESLEELDKAVKEIVRRI

SEQ ID NO: 23172 - protein, 57 aa, Artificial Sequence
  Synthetic
DVKTLVEELRRALEESHKLSEDVNRALKKVLEEIADLSRKVNDKLRELLKRLEEEAR

SEQ ID NO: 23173 - protein, 60 aa, Artificial Sequence
  Synthetic
SKEEKLDKKLKEAERTIRENIKENRESLERARKTLEENIRNNEDSLRRVEEEVRRIIEEI

SEQ ID NO: 23174 - protein, 56 aa, Artificial Sequence
  Synthetic
VDDILRRIEEILRRSHRLSKEVNKRIKELLDRSHELSKRVNDELDKVLKEIRREAK

SEQ ID NO: 23175 - protein, 60 aa, Artificial Sequence
  Synthetic
DEDEELKKVLDRAKKRVDELVRNNEESLERVKRAVDRLIEKNERSLERAEDELRKLVKEI

SEQ ID NO: 23176 - protein, 56 aa, Artificial Sequence
  Synthetic
VEKLKKELDDMLRKLEELSRRVNRTLEELLRRIEELSREVDERIKKVLKEIKDRVK

SEQ ID NO: 23177 - protein, 60 aa, Artificial Sequence
  Synthetic
SEKEELDDVLRRVEEKVRRNVRKNEDSLKKVEDEVRRNIRNNEKSLEDAERDVRKLAKDV

SEQ ID NO: 23178 - protein, 56 aa, Artificial Sequence
  Synthetic
VKKLLKELEDLARESHKLSRDVDRKLEDALRRSHRLSREVNRKIEEMVRKLREDTR

SEQ ID NO: 23179 - protein, 60 aa, Artificial Sequence
  Synthetic
KEEERVTDALRRVRETAKKNIEYNRRSVERVERTLKELVKNNTRSLERVRKAVKELVERI

SEQ ID NO: 23180 - protein, 56 aa, Artificial Sequence
  Synthetic
VDKLIERLERVLEKSHRDLRRNSKDNKRILDEIKKESEEVNRRLEEVLRKIKEDVE

SEQ ID NO: 23181 - protein, 61 aa, Artificial Sequence
  Synthetic
DKVRELEKTLRDLLRENHRISEDLNKKLKDMARRNKKHSEDVIEKIKRLLDRLREIVKRDG

SEQ ID NO: 23182 - protein, 59 aa, Artificial Sequence
  Synthetic
DELVRRVREVLREVEERLRDNIKDNRRSLDDHRRVIEETRRESKRAVERAEDEVKKLED

SEQ ID NO: 23183 - protein, 61 aa, Artificial Sequence
  Synthetic
SKVEDLIRRLKTLLDDLRRISREVDEKIKEILKEVERHSKEVIDRIKDILRRVEEIVRRKG

SEQ ID NO: 23184 - protein, 59 aa, Artificial Sequence
  Synthetic
KRLVERVEKVAREVEEAVRKLIEKNKESVERAEETARRLIERSKRAVDEARRKIEELRR

SEQ ID NO: 23185 - protein, 61 aa, Artificial Sequence
  Synthetic
SKVEELIERIERLLEEVRRISDKVDEDLERLIRENEKHSKKIIKELEKLLKELEDIVRREG

SEQ ID NO: 23186 - protein, 59 aa, Artificial Sequence
  Synthetic
KRLVERLRKVVEDAEREIRRLIEKNKRSLERHKRELERTIKESRDVLKKVEDRVRELAR

SEQ ID NO: 23187 - protein, 61 aa, Artificial Sequence
  Synthetic
SKVEDLERRIRKILREVEEISERVNRALKRLLDENRKHSEKIIRELEELLRRLEEEVRTKG

SEQ ID NO: 23188 - protein, 59 aa, Artificial Sequence
  Synthetic
KSLVDRVRKAVEEAEERIRRLIENNERSLRRHEEAIKKTIEESDKVLEDVRRRAEELLK

SEQ ID NO: 23189 - protein, 61 aa, Artificial Sequence
  Synthetic
SKVERLIERLKELLDENHKISERVNKELERLARENDKHSKDLIRDIERILREVEEIVRRDG

SEQ ID NO: 23190 - protein, 59 aa, Artificial Sequence
  Synthetic
RRLVEEVRRVLREVREAAKENIRNNRESLKRHKDALRKTIEDSARVVKRAEERIRELER

SEQ ID NO: 23191 - protein, 61 aa, Artificial Sequence
  Synthetic
SKVDELVERIERLLRELTKHSKEIIDRLKKLLEDNERINRDVIRRIEEILKEVKRIVERDG

SEQ ID NO: 23192 - protein, 59 aa, Artificial Sequence
  Synthetic
EELVRKVREVVDRARERVEELIRRTEDVLKKHREELKKLIEESRRVLEEAKKTADELKK

SEQ ID NO: 23193 - protein, 61 aa, Artificial Sequence
  Synthetic
DEVRKLKEDLRRLLKENKEKVEKVIRENEKLLRENKKMVEDAERDLRRLLKELEDLVRKRG

SEQ ID NO: 23194 - protein, 59 aa, Artificial Sequence
  Synthetic
KELVDEVRRVARRVKEENKRLLDEVRKVSEEVERTNRELVRRVEEVVREVRERIDELLR

SEQ ID NO: 23195 - protein, 61 aa, Artificial Sequence
  Synthetic
SEAEDLERRIEKLLEDNTRLVERVIEENEKLLRDNAEHSKEVEDRLRDLLRRLEEVVRKRG

SEQ ID NO: 23196 - protein, 59 aa, Artificial Sequence
  Synthetic
EELIKRVEEVVRKAKKTNEDLLREVEKVSREVKKANEDLLRRSKEVVDEVEKDIERLKR

SEQ ID NO: 23197 - protein, 61 aa, Artificial Sequence
  Synthetic
DDIERIIEKLKELLERNKRHTEEVIKELERLLRENERHSREVKKRLEELLKRLEDVVRREG

SEQ ID NO: 23198 - protein, 59 aa, Artificial Sequence
  Synthetic
EEVIRRIEEAVREVKEANKDLVRESRRVARRVEEENKRLVEESRRVVEKVEKRIRDLLR

SEQ ID NO: 23199 - protein, 61 aa, Artificial Sequence
  Synthetic
DEIDEARKELEEILRENREKVDEVRKRLEKLLRENEEVVKEIIRRLKELLKELERVMREEG

SEQ ID NO: 23200 - protein, 59 aa, Artificial Sequence
  Synthetic
EKLVREVRKDAERAERELRRSVEDIRRVVERVKRENERLLREVEKVVEEVKEELRKIET

SEQ ID NO: 23201 - protein, 61 aa, Artificial Sequence
  Synthetic
DEIERVIEELKKRLDENRRVLEEIIRRLEELAKRNKRHSEELEKRLREELDKVRKRLEETG

SEQ ID NO: 23202 - protein, 59 aa, Artificial Sequence
  Synthetic
RELIERMREVVEEVERALRKSLKDVEDVVREVEKKNKELLEKSKKVVEDVRRTLEKLRE

SEQ ID NO: 23203 - protein, 61 aa, Artificial Sequence
  Synthetic
SEVEEAIKTLKKLLDDNKRHTEEVIRRIEELLKRNEEHSRKVIEDLERLLRKLEKMVRDRG

SEQ ID NO: 23204 - protein, 59 aa, Artificial Sequence
  Synthetic
EEVVRRMEEAVRRAEETNKDLVRRSREVVRRANETNKKLLEDSKRVVERVEKRLEELLR

SEQ ID NO: 23205 - protein, 61 aa, Artificial Sequence
  Synthetic
SELEEIERELEELLRENKKLVDRVREELKKLLDELRKHSERVIREIERLLEELERVVRKRG

SEQ ID NO: 23206 - protein, 59 aa, Artificial Sequence
  Synthetic
EELIKRLTDVVRKVKEDNKRLVEEARRVVEEVKREIKRLLEESREVVRRAERRLEELRR

SEQ ID NO: 23207 - protein, 61 aa, Artificial Sequence
  Synthetic
SEIEDAERKLKKLLEDNTDMARRLIERLRKILEENKRHSERVKRELEEILKELEDLLRRKG

SEQ ID NO: 23208 - protein, 59 aa, Artificial Sequence
  Synthetic
EELVKRVEDVVRKVDEDNKRLVEEVRRVVEEVRKTLEDSLRESERVVREVKKRLEDLKR

SEQ ID NO: 23209 - protein, 60 aa, Artificial Sequence
  Synthetic
SEREKMEKVVREAKKDLDRSLKRVKEVAEEVKKELDRSLEEVKRVSEENKKEVDRIRKKG

SEQ ID NO: 23210 - protein, 56 aa, Artificial Sequence
  Synthetic
VDTLVRRLEKILEENRRIVKEIEDRLRKLLEDNKRVVDEIIKRNEDSVRDVERRAK

SEQ ID NO: 23211 - protein, 59 aa, Artificial Sequence
  Synthetic
SEREKVEEVVREAKERLDESVKRVEEVSRENKKEIDRLLEEVKKVIEEAKRRLEELRRR

SEQ ID NO: 23212 - protein, 56 aa, Artificial Sequence
  Synthetic
VDEVLKELRRILRDNERMVKEVIERNRKSVEDLERIARRIIEEIERLLKELTDRAR

SEQ ID NO: 23213 - protein, 60 aa, Artificial Sequence
  Synthetic
SEDEEVEEAADRHRRSVEDSSRDLKKVLDEDRRTVAESSRKLKEILREVEREVKRVEDDG

SEQ ID NO: 23214 - protein, 56 aa, Artificial Sequence
  Synthetic
VEELKKRLKELSDESRKSLERVKRKLEETSRRSEESLRRVKKDAERLVREIEKRAK

SEQ ID NO: 23215 - protein, 60 aa, Artificial Sequence
  Synthetic
SEDEKVKKVLDDVRRKAEDSSRRITEVLRRHEETVRRSSEKLKKLLDELREDADRVRRAG

SEQ ID NO: 23216 - protein, 56 aa, Artificial Sequence
  Synthetic
VKDLERKARDIVRKSEESLERVVRELERLSRDSERSLKKVKEDLERVVEEIRRRAD

SEQ ID NO: 23217 - protein, 59 aa, Artificial Sequence
  Synthetic
SEDEEVEKVLREDEESVKRSSDEIRKLLEDHERTVRESSDELKKALDEVRKRLDELKRR

SEQ ID NO: 23218 - protein, 56 aa, Artificial Sequence
  Synthetic
VEDLKREAERTSEESRRSLEEVRRRLEELSERSRESLKRVKDELKRVVEEIEERAR

SEQ ID NO: 23219 - protein, 60 aa, Artificial Sequence
  Synthetic
SEDEEVKRVLDELRKRLKESSDRLREVLKRDKRTLEKSSEDIDRALKKVERALTEVLKEG

SEQ ID NO: 23220 - protein, 56 aa, Artificial Sequence
  Synthetic
VKELLDTLRKLVEESEESLREVVERLDKTSEDSKESLRRVIETLDRLVKDIDEKAK

SEQ ID NO: 23221 - protein, 59 aa, Artificial Sequence
  Synthetic
SELEKLKKEIDDLSRDLDRILKELKKRVEELTRRSEKVLEDLRKTLEDIVKTLEDLARG

SEQ ID NO: 23222 - protein, 59 aa, Artificial Sequence
  Synthetic
SELVKRAADVVEKHRRSLERLLRTVTKIVKDHHERNEEIVDEVRKVVERAKERLEEIRK

SEQ ID NO: 23223 - protein, 59 aa, Artificial Sequence
  Synthetic
SEVDELRRRVKKLSDDSKRVLDELSRRLKELSERLAEIVKEVHRRNEELVDRLRRLKDK

SEQ ID NO: 23224 - protein, 59 aa, Artificial Sequence
  Synthetic
SELVEEVKRVVEKHHEDNKRIVEALAEMVKDHKRTIDELRRRLEESVKDAEKKLRDVSR

SEQ ID NO: 23225 - protein, 59 aa, Artificial Sequence
  Synthetic
SELEELERRLKELSDESRRVLRELLERLKELSKDLERILEDLKEKVKKIEKDLRELKKR

SEQ ID NO: 23226 - protein, 59 aa, Artificial Sequence
  Synthetic
SDLVREVARVVKEHHDENEDIVRRVKEAVDEHRETIERLRRAVERVVKEVERRLKEEAR

SEQ ID NO: 23227 - protein, 60 aa, Artificial Sequence
  Synthetic
SKDEELERVVKEVREVLDDVNREVTKVSDDVKKRLDELLEEVRRVSDEVRKRLDEVLRER

SEQ ID NO: 23228 - protein, 56 aa, Artificial Sequence
  Synthetic
VEEAKRRLEKLVRDIRRLTEEHKKRHEDLVREVEEIVKKLKDDHRRLVEDIERAIR

SEQ ID NO: 23229 - protein, 59 aa, Artificial Sequence
  Synthetic
SVLDELREKAKKNIKESEELLRRNEDHSRRDTERSKKLLEDLERRVKEVVREAERIKKK

SEQ ID NO: 23230 - protein, 59 aa, Artificial Sequence
  Synthetic
KDVVRDLERVVKEVEDSNRKVADDSRRSTEDNKRKNEKVERDARELLKEIEEIVRRLEK

SEQ ID NO: 23231 - protein, 59 aa, Artificial Sequence
  Synthetic
DSLERLREIVERIVREARRLLRENEEHSERDTREVERLLEEVERRLRRVVEEAEKIKKR

SEQ ID NO: 23232 - protein, 59 aa, Artificial Sequence
  Synthetic
EDVVREARRIVDELRKEVKEIVERSRKSTEDNERRNRKVIEDLKRLVKELEDRIREIKK

SEQ ID NO: 23233 - protein, 60 aa, Artificial Sequence
  Synthetic
DFEERLKEVLKDAERVVDENKKENKKVLDKAKKVVDENRDRNRRVLEEVEREIRRLIDEI

SEQ ID NO: 23234 - protein, 58 aa, Artificial Sequence
  Synthetic
KEVEEVLKEIKDILRESSKTSKDLVRRTEEILEESSRDSDRVAKESKKLLEEVKEEVR

SEQ ID NO: 23235 - protein, 60 aa, Artificial Sequence
  Synthetic
SFEEKLDKVVREVEDKIRRLVKRNRDAVKRVADEIRKLKDRNEEVVDRAREKIKRLIDEI

SEQ ID NO: 23236 - protein, 58 aa, Artificial Sequence
  Synthetic
KEVEEVLTRLKEKLKRVEESSEKVVRDSERLLEKIKKLSKDVEDESRKLLERVEREVR

SEQ ID NO: 23237 - protein, 60 aa, Artificial Sequence
  Synthetic
SEVERLLKELKELLEELKKKVDDVLKDLEELLKRLEDHTREVVKRSEDLLRELEEMKRRG

SEQ ID NO: 23238 - protein, 59 aa, Artificial Sequence
  Synthetic
EEVVRELRRVLEEVRRTAERLLEKLDTVLKKVEDKIRELLKESTRVNKDAKREIDRLRK

SEQ ID NO: 23239 - protein, 60 aa, Artificial Sequence
  Synthetic
SEVETILEDLRRLLEELKKHSDEVVKEIKDLLREIEKHTREVVKTSKKLLKELEELRKRG

SEQ ID NO: 23240 - protein, 59 aa, Artificial Sequence
  Synthetic
EELVRKIEKVLKEVRETIKKIAEDSDRVLEEAKEVAKRLKDESDRVNEEVRKRIEELKK

SEQ ID NO: 23241 - protein, 60 aa, Artificial Sequence
  Synthetic
SDVDRVLEEIRKLLEDLKRHSEKVSEENEDLLRKNTELNKRVSEDNERLLEELKRLRERG

SEQ ID NO: 23242 - protein, 59 aa, Artificial Sequence
  Synthetic
EELKKKLDEVLERAKRTIDRLLETSDRSLEKVERDLRRLNEELDRSLERAERTIRELAK

SEQ ID NO: 23243 - protein, 60 aa, Artificial Sequence
  Synthetic
SEVDEVLERIKRLLERLAEHSDKVVRDIEKLLDDNRKENERLLDKLRRELKRLEEMRRRG

SEQ ID NO: 23244 - protein, 59 aa, Artificial Sequence
  Synthetic
EELRRKLEKVLREAEKVIDELLKKTDEVLKRARETIEDLNRKLDKVLKEVRDKLDRLRD

SEQ ID NO: 23245 - protein, 60 aa, Artificial Sequence
  Synthetic
SSIEKVKREVDEVIKTSKKSSEDSEKLVRDVEERLRKLVKDVRDRVKRVIEEMERLVRER

SEQ ID NO: 23246 - protein, 58 aa, Artificial Sequence
  Synthetic
ELVERLKEVLKRLEEVSEESERRNREVVRRLEDTARKLTEELRRVLTELRDVLRRLEK

SEQ ID NO: 23247 - protein, 60 aa, Artificial Sequence
  Synthetic
KDEETLKRLLEKAKEVVDRLKDENEKVTRDNHESVKKAKDANKRSNEKSERVARDAIRRV

SEQ ID NO: 23248 - protein, 56 aa, Artificial Sequence
  Synthetic
VRELAKKVEKAIRELEELSRENREAVKRISDEIKRLSDENAKDSERIIKEIDDRVR

SEQ ID NO: 23249 - protein, 60 aa, Artificial Sequence
  Synthetic
SDDETVTKLLKEAEKVVRELTKRNKELLRKNHESVREAKKRNEDLSRKLEEVVRRLIEEI

SEQ ID NO: 23250 - protein, 56 aa, Artificial Sequence
  Synthetic
VKDLAKKIEDVIREMEELTRRNEKRIEEISDEIRRLSDTNRREIERIREELRRRAK

SEQ ID NO: 23251 - protein, 60 aa, Artificial Sequence
  Synthetic
REDERLEEIARKIKKVVDELVERNKKLTEDNHESVRRAEKRNRELSRELEEVAKRAIERI

SEQ ID NO: 23252 - protein, 56 aa, Artificial Sequence
  Synthetic
VEDIERKVEDIIRRLEDLSRRNEEKVRRISEEIKKLSKDNERTIKEIIKEIEERVK

SEQ ID NO: 23253 - protein, 60 aa, Artificial Sequence
  Synthetic
DELDRLREEIKALIKESRESLKRLEEESRRLAEELRKLIRELKERIERIIEEARRLAKEI

SEQ ID NO: 23254 - protein, 59 aa, Artificial Sequence
  Synthetic
DDVRKKVEDVLEEARRRITDDEDKTKKVHDESRRVVEEVRERVKRLLDKARTVVKEIEK

SEQ ID NO: 23255 - protein, 60 aa, Artificial Sequence
  Synthetic
SEVEDLERKIEELIERAKRLVEELEERSRRLIRELEELSKKNEEDIERLIKEAKKLAEDI

SEQ ID NO: 23256 - protein, 59 aa, Artificial Sequence
  Synthetic
EEMRRRVRELLKKAEEVVRRLEKDSDRVSKESEDMVRELLRRNEEALRKAEEVVREIKR

SEQ ID NO: 23257 - protein, 60 aa, Artificial Sequence
  Synthetic
KDIDELRKRIETLIREAKKLVDDVRKRSEDLIERLKKLSEDNARDIERLLREAEDLARKI

SEQ ID NO: 23258 - protein, 59 aa, Artificial Sequence
  Synthetic
REVKERVRRLLEKAADVVRRLIEESNRVSDDSRRVVKELLDRNKELLDRARKRVEEIRK

SEQ ID NO: 23259 - protein, 60 aa, Artificial Sequence
  Synthetic
DDIERLKREIERLLKEAEKISRDNEERSKELLDRLRKLSEDNKRKIDKLVEELKRLADKI

SEQ ID NO: 23260 - protein, 59 aa, Artificial Sequence
  Synthetic
EKVKRDAREALRKAKKKVDELKRKNDEVHRRSREEVKRLLEENRKLLEDLRRMVREITQ

SEQ ID NO: 23261 - protein, 57 aa, Artificial Sequence
  Synthetic
RKVEEVEKHSRESIKEIERLVEEVRKHSKDSIRRIEKLVEDVERHSRKVIEELERDK

SEQ ID NO: 23262 - protein, 59 aa, Artificial Sequence
  Synthetic
KDMVRRLEKILKEDKEVVKKAEEELRELLKEDREVVKRAEEELERLLKETEDVVRKVET

SEQ ID NO: 23263 - protein, 57 aa, Artificial Sequence
  Synthetic
SALEEVKRHSEESIKAIEELVRRVEKHSRESSKRNEELIREVEDHSRRVIEELKRKK

SEQ ID NO: 23264 - protein, 59 aa, Artificial Sequence
  Synthetic
EDVVRAAEKLLEEDRDAVRRAKEKLDELLKRDRDSSREAIRELERLLKETRDVLREVER

SEQ ID NO: 23265 - protein, 60 aa, Artificial Sequence
  Synthetic
SEIEKILKDVDKKLKDSSRESEESVKESRDLLRESSERSERSVRETRKRVDDLLRLVDER

SEQ ID NO: 23266 - protein, 59 aa, Artificial Sequence
  Synthetic
EDMKREIDKLVEKLKKVLRDNKRLHEKVIRELEEVVTRNEELHRRVIKEAKEVVDRVRK

SEQ ID NO: 23267 - protein, 60 aa, Artificial Sequence
  Synthetic
SEVEEVLRRIEELLREDKRHVEEVVREIRELLKRNKDMVDEVLKRIEDLLREIDEARKRG

SEQ ID NO: 23268 - protein, 59 aa, Artificial Sequence
  Synthetic
EEVIRKLDDILRKVKRVSEDNKRETDKVREEVAEVVKRSKDKLDKVRKDVKRVIERVRT

SEQ ID NO: 23269 - protein, 60 aa, Artificial Sequence
  Synthetic
DEVEKAAEDVERRLREDEDHARKVVKRIRELLEEDTRTVDKVLREIEKLLKDITDLRRRG

SEQ ID NO: 23270 - protein, 59 aa, Artificial Sequence
  Synthetic
KELTEKLDRLLERVEEVSKRNEDATRTVEKEVEEVVRRTKKKLDDILERVERVARELKR

SEQ ID NO: 23271 - protein, 60 aa, Artificial Sequence
  Synthetic
ELIKKARKDVEEVRERSERLVDELRKRNKKLADESRRLIDKLRKDVEKVLREIEDLLRKR

SEQ ID NO: 23272 - protein, 59 aa, Artificial Sequence
  Synthetic
KKLMEEVERLIKRLEDVNEKSERDVREINKESERVNEETEREVEDAIRKLREVLRRAKK

SEQ ID NO: 23273 - protein, 60 aa, Artificial Sequence
  Synthetic
KEVEDLERRVKEILDRMKRLIDENRKKIEKSIRELERLIDENRKEVERVKKELKDLKREG

SEQ ID NO: 23274 - protein, 59 aa, Artificial Sequence
  Synthetic
KEMEKKLEDIVRRVREVVRRAHETNERLVDRSRKAVEKAERTNRRLVEEIRKVAEEVRK

SEQ ID NO: 23275 - protein, 60 aa, Artificial Sequence
  Synthetic
DEIRELEERVRRILDELRRLVERNREVIERSIRELEKLLDRNRRKVEEILRRIDDLTRRG

SEQ ID NO: 23276 - protein, 59 aa, Artificial Sequence
  Synthetic
ERVKEAIKELVKDVDRVMREVDRANRELTKTSKKVLEDVDRTNRRLVKEVRDVVERARK

SEQ ID NO: 23277 - protein, 60 aa, Artificial Sequence
  Synthetic
KEVEDLERTVRTILKRMRELITRNEEEIRRSIEELKKLLKENKDTVRRILEEMKELKKEG

SEQ ID NO: 23278 - protein, 59 aa, Artificial Sequence
  Synthetic
EDAKRKLDELTKRVEKVVREADERNKRLTKRSKEVLDEVHRANEEALKEVEEVVRRVTK

SEQ ID NO: 23279 - protein, 60 aa, Artificial Sequence
  Synthetic
DEIEELRKKAEEIIRRMEDLVRRNTETIKRSIETLKKLIDENRRRVRKIIETMKELKRRG

SEQ ID NO: 23280 - protein, 59 aa, Artificial Sequence
  Synthetic
EEVKEAIERLVRRVEEVVRKVREENKRLNEESEEVVRRADRTNREILKRVRDAVREVRR

SEQ ID NO: 23281 - protein, 59 aa, Artificial Sequence
  Synthetic
DAEDTLRDITRKVRKVLEEHRETIERTIRKNRESLERVKRAIEELIERSRRALEEVTRS

SEQ ID NO: 23282 - protein, 59 aa, Artificial Sequence
  Synthetic
DEMLKRVEDIVKKLIEDLREMAKRNRDISKEVDDRLKKILDEVRKHSEEVIKRLKDEER

SEQ ID NO: 23283 - protein, 59 aa, Artificial Sequence
  Synthetic
SAEETLERLAREVRKVLEEHARKIKKTIDDSRRVLEEHRKTIKRTIDESRKVIKDVRDD

SEQ ID NO: 23284 - protein, 59 aa, Artificial Sequence
  Synthetic
EEVLRRVTEEVKELIERIERLLKENRKHSKKIIDRLRELLEENRRHSEELRKRLEDERR

SEQ ID NO: 23285 - protein, 56 aa, Artificial Sequence
  Synthetic
SSLDEIRRKVREAIERLERLLEENRRKVEEVKRRNERLLDRNREVVDEVIKRLEEM

SEQ ID NO: 23286 - protein, 59 aa, Artificial Sequence
  Synthetic
REVDEELKRLVEEVKKVVDDVRRENKRLLEEVERVSEEVKKTNEKLLERVKRVVEEAER

SEQ ID NO: 23287 - protein, 55 aa, Artificial Sequence
  Synthetic
SSLDTAREHTRDVIKKIDDILRRNEKLVDDVIRELERLLRENAEVVERVIDRLRR

SEQ ID NO: 23288 - protein, 59 aa, Artificial Sequence
  Synthetic
REVVEELKELRKRSEEVVDRAEKALRRSVRKAEKVVEEVERANKRLLERVKKVVDDMRR

SEQ ID NO: 23289 - protein, 61 aa, Artificial Sequence
  Synthetic
EVRERVKEVIERSEKSVRELERIVEELARRLRESVEDLERKIRELSKELRRVVEELVRTRG

SEQ ID NO: 23290 - protein, 59 aa, Artificial Sequence
  Synthetic
EEVVRRIEELLKEVHKENKRVADELKKLVEDLHDRNRRVKEEVKRRVDEVRRKAEEVAR

SEQ ID NO: 23291 - protein, 61 aa, Artificial Sequence
  Synthetic
EVDERIRRLVEESRKSVEDLARIVDELVERLRRSVRDLEEKSKRNKEELEKVLRDLARTRG

SEQ ID NO: 23292 - protein, 59 aa, Artificial Sequence
  Synthetic
EEVVERVERLIEKVHRDNRRVAEKLREDVRRVHEDNKDVARKSHKLVKEVRDTVREVRR

SEQ ID NO: 23293 - protein, 56 aa, Artificial Sequence
  Synthetic
DVLKEVEEDSRRNHERNRRVAEKVTDDSRRNVKRLEEVAEEIKDDSRKNKERLDKL

SEQ ID NO: 23294 - protein, 59 aa, Artificial Sequence
  Synthetic
KEIEKILRDVLKENEDSLRELKEILERLLEENRKAVEKLKRILEELLRRNDEMLKRVRT

SEQ ID NO: 23295 - protein, 56 aa, Artificial Sequence
  Synthetic
SVDEEVRRDSKKNKEDLDRVAEKVKRDSEENMRRLEEVARKVTEDVKRNKKTLEDL

SEQ ID NO: 23296 - protein, 59 aa, Artificial Sequence
  Synthetic
EEIRRILKELLERNERALEELKKRLRKVLEENKTVLEELRRRLEELLRRNKRMVDEARR

SEQ ID NO: 23297 - protein, 59 aa, Artificial Sequence
  Synthetic
DEVEKLVEDVARVNKKSLDEVRRLLEELEKVSRDHRREVERSLREAEKVLEDLKREAEK

SEQ ID NO: 23298 - protein, 55 aa, Artificial Sequence
  Synthetic
DEIRKVKKHNEDVLRKVRKILKDAERISKRALDENERILKEVEKRVRDVIRELER

SEQ ID NO: 23299 - protein, 59 aa, Artificial Sequence
  Synthetic
DEVDDVVRRLEEENRKSEERAKDTLRKAKKVLDELKKRVKESEDRVKEVLDDVEERVRR

SEQ ID NO: 23300 - protein, 55 aa, Artificial Sequence
  Synthetic
KRVRDALRHNEDVLRRNDEIVDELRKRVEDVLKKNEDDVRRVAEEVRRVIEELRK

SEQ ID NO: 23301 - protein, 59 aa, Artificial Sequence
  Synthetic
DRVEEVVKRAKDENRKSEEEVKKSLKDLEDLSREHEKRIRDLLKEVKEILDRIREEVEK

SEQ ID NO: 23302 - protein, 55 aa, Artificial Sequence
  Synthetic
DEIRKLERHNEEVLKKNETIARDLEKRSREVVKRLEDILRKVEREVEKALEEVRT

SEQ ID NO: 23303 - protein, 56 aa, Artificial Sequence
  Synthetic
SVEEELRKLKEEIDRVLEENKKIIDDIRKELDDVNRENKKIIDDIRKEIDDVLERV

SEQ ID NO: 23304 - protein, 59 aa, Artificial Sequence
  Synthetic
EKDLKKLLEEVRELLERSRRASEELLREVKRLLDESRKESKRLADDVRRLLEELERRTK

SEQ ID NO: 23305 - protein, 56 aa, Artificial Sequence
  Synthetic
SVEDIIRKIEKELDDVNRENEEIIRRIKKELDDVNRRNEKIARDSKKRVDDVLRKV

SEQ ID NO: 23306 - protein, 59 aa, Artificial Sequence
  Synthetic
EEVVKKIREEVRKLLEESKRRSDELAKEVRELLKRSEDKSRRNLEEVEKLLKEVEDRTR

SEQ ID NO: 23307 - protein, 60 aa, Artificial Sequence
  Synthetic
KDLEDVLDKVRKDLERSKKHSDDVVKTIRELLKESEKHSEELVKRVEKLLEELRRMTTRG

SEQ ID NO: 23308 - protein, 56 aa, Artificial Sequence
  Synthetic
ESILRELERRVKKVVEENDEITRRVEREVEKVDKKNKDITDTLRTRVKKAVDEARK

SEQ ID NO: 23309 - protein, 60 aa, Artificial Sequence
  Synthetic
SDIERLLREVEKVIRDSEEETRKLLEEVEKALKDSRDSSEDVKRKVDDILRKLRELRRRN

SEQ ID NO: 23310 - protein, 60 aa, Artificial Sequence
  Synthetic
MERIERLLREVRKRVEEAAKRNKDVIKEIEERVRTVHDENRRLLEEIAKRVRDVLEEVRT

SEQ ID NO: 23311 - protein, 57 aa, Artificial Sequence
  Synthetic
KVEEELEKEVRRALEESKRLLDRLTEHSKRVLDELRELLERVERDVRRVLEELKRER

SEQ ID NO: 23312 - protein, 56 aa, Artificial Sequence
  Synthetic
KDVVDRLEKELKKVNDEARKRIEELLRESDRVLEEVKKKMRELERELKKVLKEVRD

SEQ ID NO: 23313 - protein, 57 aa, Artificial Sequence
  Synthetic
DEVEDADRKVRTVLEDLRRRLEELKKHSDDVSRRNEKLLRELKEHSDRLVEEIKRDK

SEQ ID NO: 23314 - protein, 56 aa, Artificial Sequence
  Synthetic
KRVVDELLKKLRDVLEEVRRTVDELVKRSEESLRRAREVIRRLLEKTREVLEEVRT

SEQ ID NO: 23315 - protein, 55 aa, Artificial Sequence
  Synthetic
STEDVLRKIKEDVKRVIDDNRRILDEVRRTSKRVLDDLRRNLKHIAEEVERVLRE

SEQ ID NO: 23316 - protein, 56 aa, Artificial Sequence
  Synthetic
SKELLEKAKRVVDEIKRLAEESLKRLEDLSRDHKRRAKELNDEIRKVVDELRKRAT

SEQ ID NO: 23317 - protein, 55 aa, Artificial Sequence
  Synthetic
SLEEVLDEIRKLVERALRDLERNLRHVTRTSEEVLRRNEEILRRIEEKVDRVVRN

SEQ ID NO: 23318 - protein, 56 aa, Artificial Sequence
  Synthetic
SKELLDEIRRVLEEVKRRVEELNKELKDLSDKHKEKAKRTDETITDVLRKAEERER

SEQ ID NO: 23319 - protein, 60 aa, Artificial Sequence
  Synthetic
SVEELLREVAELVKRVDEDLRRLLEEVRRSNEEVIRRLEEILKRIEEENRKVVEELRRRG

SEQ ID NO: 23320 - protein, 59 aa, Artificial Sequence
  Synthetic
EETVKRLLDELRELLERLKRTIEELLKRNRDLLRDAEEKARRLLEENRKLLKKARDTAT

SEQ ID NO: 23321 - protein, 60 aa, Artificial Sequence
  Synthetic
SLEELVRDVERLVKESIEELERVVEDVRRLNTELKEKLERVAREIKKRNDDLVRELRTAG

SEQ ID NO: 23322 - protein, 59 aa, Artificial Sequence
  Synthetic
EEVIDRLRKELEDIIRESRKNLEDLLRENKRLVEEVERTLRELLRTNKELLERIREEVR

SEQ ID NO: 23323 - protein, 60 aa, Artificial Sequence
  Synthetic
SVEEMLEKIRRRATESVKRLRKILKEIKERNEKAIRDDRRLLEEIERRIREVVKRLRDAG

SEQ ID NO: 23324 - protein, 59 aa, Artificial Sequence
  Synthetic
EETVKRLEEEVEKIVRDSERNAREMLERNRRLIEESKKRTKDLLKEVEDEVRKLEEEVR

SEQ ID NO: 23325 - protein, 60 aa, Artificial Sequence
  Synthetic
SVEEIVRRIREELKKVEEDSERIVRTVEDVLRKVLETVERIVRESEKRSRDAVRRIREKL

SEQ ID NO: 23326 - protein, 59 aa, Artificial Sequence
  Synthetic
DEVATRLLKEVKEELDRLREENERLLRELKETVEKLKRDAEKVVEDDERLVRELEKRVD

SEQ ID NO: 23327 - protein, 60 aa, Artificial Sequence
  Synthetic
DIEELLEEIRRRAEEAHRRNEDLLRKIKELVKKARKDNEKVVRDIERRLREVLERVRKKI

SEQ ID NO: 23328 - protein, 59 aa, Artificial Sequence
  Synthetic
REEVKEVLKRVEDLLRTSEEETKELLKRVEDELRRSKEDSEDVLRKVEELLERIDRRVT

SEQ ID NO: 23329 - protein, 60 aa, Artificial Sequence
  Synthetic
KEIEEILEEVKRLLDKLKEDSDRILERVRELLERSKEKSREILKRVEDLLRELEKLVRDD

SEQ ID NO: 23330 - protein, 59 aa, Artificial Sequence
  Synthetic
EELRRVLEEIRRLLEEVRRKIEEASRRLKEDADRVHRKNEEILKRIEELIEEVKRRVEK

SEQ ID NO: 23331 - protein, 60 aa, Artificial Sequence
  Synthetic
KEVEDILREVDKLLKESKRKSEEALKRVKRLLDELKKTSKRILREVEKLLERLRRLKKDD

SEQ ID NO: 23332 - protein, 59 aa, Artificial Sequence
  Synthetic
KDLKKIVDDIRRKIDKVDKDNERLIKELEDRVRKAREDIRDISRRIRELVKRVVDEVEK

SEQ ID NO: 23333 - protein, 60 aa, Artificial Sequence
  Synthetic
DEVETILRDVKRLLEESRRESERVLEEVRRLIEELKKRSRDIMEEVKKLLEELREIVRRD

SEQ ID NO: 23334 - protein, 59 aa, Artificial Sequence
  Synthetic
EEARRLLEEADRLVREVDKENEDILRRIEESVREVEERIRRISRAIEESIRRVKEEVER

SEQ ID NO: 23335 - protein, 60 aa, Artificial Sequence
  Synthetic
KEVEDLLREIERLLKESRERTKKVEEDVKRLLDESRKTSEDVLREVERLIRELEKIVRED

SEQ ID NO: 23336 - protein, 59 aa, Artificial Sequence
  Synthetic
DKARKLVEEAKRRLDTVNEENKDVVRKIKEDLERVDEENRDVLRRIKRIVERVEEEVRR

SEQ ID NO: 23337 - protein, 58 aa, Artificial Sequence
  Synthetic
DEAERLLRRIEEILKRSKDVSDKLLEDNEKLVRDVKRRLDEHLRKNREALKKLREELK

SEQ ID NO: 23338 - protein, 56 aa, Artificial Sequence
  Synthetic
DEVVRRIEELVKKLEEDNKRVVEEIKKLNDDLRREVKRVLDEARKLNKEIVDELRK

SEQ ID NO: 23339 - protein, 59 aa, Artificial Sequence
  Synthetic
SEVDELRRRVEEVERRSEENSRKHLEDNEKMVDDLRKNLERHLKENKELVERVRRVVED

SEQ ID NO: 23340 - protein, 56 aa, Artificial Sequence
  Synthetic
DRVVEDLKRRADELVRRNERAAEEVRRLNEEVVEDLKRVVKEVKDLNDELVKEVRR

SEQ ID NO: 23341 - protein, 60 aa, Artificial Sequence
  Synthetic
SVEEVLKEIEKEHRRSEEEVKDVLRKARKINEEVERRVKEVVDRIRETIARVRKEVKDRN

SEQ ID NO: 23342 - protein, 59 aa, Artificial Sequence
  Synthetic
KDVLKKLLDRSRRLVEKVRDDLRKAEEKNRRVAEEIKETLKRMEDRVREELKEIKKKAK

SEQ ID NO: 23343 - protein, 60 aa, Artificial Sequence
  Synthetic
SVEEVLKEIEDLHKKSIDEVREVLKEAEDLNRRAVKEVEDALRESEELNRRVTKEVRDEN

SEQ ID NO: 23344 - protein, 59 aa, Artificial Sequence
  Synthetic
KEVLDRLLEKSEKLARDVRKRLKEVLDKNRKVVEEIRKVLEELLRHSERKLERIRERLK

SEQ ID NO: 23345 - protein, 61 aa, Artificial Sequence
  Synthetic
DVEDVVRELKKLLDEITRRSEEVVKRLHDRNEEAKEEVRRVVKEVRERLKKVVDDVRRELK

SEQ ID NO: 23346 - protein, 59 aa, Artificial Sequence
  Synthetic
REVLRKLKKEIKDLLDRIEELNKKVLDESEKLIKEIREDLRRVKEEIKEELKRIREEVR

SEQ ID NO: 23347 - protein, 61 aa, Artificial Sequence
  Synthetic
SVEEVVRRIKEKLETVVDESRRVVKDLHDKNKEIVEESRKVLRESEKVDEDVVEEVRRRLG

SEQ ID NO: 23348 - protein, 59 aa, Artificial Sequence
  Synthetic
DEELEKLLREIEDLLRKIRKLNKEVLDRSRKLLEDIRRLNKRALERNRKIAKEIRDEVK

SEQ ID NO: 23349 - protein, 56 aa, Artificial Sequence
  Synthetic
DSAEKLERDVRRALERIRKRLEENDRRVEEILERIRRRLREDLETSREVLERLRKE

SEQ ID NO: 23350 - protein, 56 aa, Artificial Sequence
  Synthetic
ESVIEKLERLLDELLEEVKRVVETSEKKLDELLEEVKRVVEESKKALDDLLREVEK

SEQ ID NO: 23351 - protein, 61 aa, Artificial Sequence
  Synthetic
DKVDEVLRRVRELLERLRKLLEDNKKTTDELLEELRRILKEDEDRTRKLLKRLRDVKREEI

SEQ ID NO: 23352 - protein, 56 aa, Artificial Sequence
  Synthetic
DRMMKRLKEELERIRKKVREVLERSSRAVERIEREVDEVVKRSSDTVKRILDEVRK

SEQ ID NO: 23353 - protein, 61 aa, Artificial Sequence
  Synthetic
SEAERVRRRVEELLRELREHSRRVLEEVKRLLEKLREDNERSLRRIKKLLDELRRVRERDL

SEQ ID NO: 23354 - protein, 56 aa, Artificial Sequence
  Synthetic
EEVLRDIERRVREIEKEVREVTRAIEESVKKIEKESRDVLRAIAETIRKIEEEVKK

SEQ ID NO: 23355 - protein, 61 aa, Artificial Sequence
  Synthetic
DEAEEVLKTVKKLLDDLRRRNEDSLRRIEELLKRLRDHSKRVLEEVRRLLEELRRVKERDL

SEQ ID NO: 23356 - protein, 56 aa, Artificial Sequence
  Synthetic
EEVLRKIKKDVEKIVRDSERVIKTIEEKIDRIKKEVKRVTDEIRKRVEEIAEEVRR

SEQ ID NO: 23357 - protein, 60 aa, Artificial Sequence
  Synthetic
SELEDVLRRSRDLLRRLKELLERLLETVRKLIEEAKELLKKILEDSRKLIREVEEMVRRG

SEQ ID NO: 23358 - protein, 58 aa, Artificial Sequence
  Synthetic
EEIRRVIKESKDLSRALEETVRRVERKIEDLLRRIKEEAERVIKESEKLIEDAERATK

SEQ ID NO: 23359 - protein, 59 aa, Artificial Sequence
  Synthetic
DEDEEVERELKKIKDKSKKVLDKSRKTIDELRKEVERTLRRWTKRSKDLLDKVEAAKRR

SEQ ID NO: 23360 - protein, 55 aa, Artificial Sequence
  Synthetic
EEVLRKVDTILKEIKRRNEKVLKELRDIIDDLAKKLDEVLRRDEELAKKVTEELK

SEQ ID NO: 23361 - protein, 59 aa, Artificial Sequence
  Synthetic
SEDEDARRTLREMLEESRKHLKEWEDTSRELEKKSREVLKETRKTIAKLADRVRKAKEN

SEQ ID NO: 23362 - protein, 55 aa, Artificial Sequence
  Synthetic
EEVLEDIRRKVEKLEEDNRRVMKKDEDAVRRVEEENRKVLKELKERIDRLAEELK

SEQ ID NO: 23363 - protein, 60 aa, Artificial Sequence
  Synthetic
DEDREAEETIKRLLDRSRKTLEESRKTSEDLRRKSEKVLRETRKSLEDSLRKVREMKKRN

SEQ ID NO: 23364 - protein, 55 aa, Artificial Sequence
  Synthetic
EKVLRDLEEIVRRAAKANKDVLDEDRRVMEEAREENKRVIDEYRKILKEATDELR

SEQ ID NO: 23365 - protein, 60 aa, Artificial Sequence
  Synthetic
SEDEEAKKTLDELLKKAEELVKKIKETSERLLRKSDKLLEETKKTIKELDDEVKEVKKRN

SEQ ID NO: 23366 - protein, 55 aa, Artificial Sequence
  Synthetic
EEVLRRIEEIIRRVTELLKKVLKEDREVVEEARKKNEEVLDRLKKIIEEAEERLR

SEQ ID NO: 23367 - protein, 59 aa, Artificial Sequence
  Synthetic
DEDEKAKRMLEEAEKKSKKHVDEVRETSKRLLEESKKLLEETDRSLRKSLERVDRVKKN

SEQ ID NO: 23368 - protein, 55 aa, Artificial Sequence
  Synthetic
KRVLDDIKTKVERLEERNKKVLDDDREMVTRAEEENRRVIKKYRDILEEARKRLK

SEQ ID NO: 23369 - protein, 59 aa, Artificial Sequence
  Synthetic
SEDEDLDRVAEKLKREHKKSVEEIKRVLKRADEESKKLVRDTERVIEEIKREVEEARRR

SEQ ID NO: 23370 - protein, 55 aa, Artificial Sequence
  Synthetic
EEVLKKLREIVRRVKEENRKVNEEVEKRLRELEEENKKVIEDLKKTVEELVERLR

SEQ ID NO: 23371 - protein, 59 aa, Artificial Sequence
  Synthetic
DDLEDIKRRLDEMREEVKRHVKRLKEVAKEIEDEHKETVRRNKEVAKKLAREIDDARRR

SEQ ID NO: 23372 - protein, 59 aa, Artificial Sequence
  Synthetic
KDKVDKVLREVTEEVKRLEEEIKKVDKEIEEIVRRVERENEEVVRDIARIVEELERKLR

SEQ ID NO: 23373 - protein, 60 aa, Artificial Sequence
  Synthetic
RELEEVIKRIEKTVTDNERANKESVDRIREIVDRLKKEIEESVRRMRDSVKKLEEEIRRR

SEQ ID NO: 23374 - protein, 59 aa, Artificial Sequence
  Synthetic
EELIRRLEKVLKEHHKRVEEIVKENEDVARDLDRRIKEIVERNRKVLEDLRRRIKELKK

SEQ ID NO: 23375 - protein, 60 aa, Artificial Sequence
  Synthetic
SEIEDALRRAERVSRESAKKLEDALRKYEKVSRDLKRRLDEVLKRYEDTSRKIAKDLRDN

SEQ ID NO: 23376 - protein, 56 aa, Artificial Sequence
  Synthetic
EETIERLIEKNKREVDKLLKKIEEVIKRNKDEVDKLLKKIEEVIDRNRRAMEEIAR

SEQ ID NO: 23377 - protein, 60 aa, Artificial Sequence
  Synthetic
SIEDELRKIVEDIEREIKKLEDDLRRVSKDHRDEVRRILEKLKEHIERLEEDADRLKKAK

SEQ ID NO: 23378 - protein, 58 aa, Artificial Sequence
  Synthetic
ETVREMIKRLEELVRRVKRRIEDVIRRNREVVDESRRRIEKAIEDNERVLKKIEEEVK

SEQ ID NO: 23379 - protein, 59 aa, Artificial Sequence
  Synthetic
SIEEEIKKVVKELEDEARKLLKKIEEHSEDLKRKLEDLLRKVEDHIRRLREEIERIKRE

SEQ ID NO: 23380 - protein, 58 aa, Artificial Sequence
  Synthetic
ETVKKAIKELRDLVDKIEEDLKRVLDENERVLREIARKIDEIIEKNERELRRVLEEIR

SEQ ID NO: 23381 - protein, 57 aa, Artificial Sequence
  Synthetic
DEAEELERRLREEVKRVETDLRRTTRELEREVEEVRRRLEKTSRENNDRSEKAERED

SEQ ID NO: 23382 - protein, 56 aa, Artificial Sequence
  Synthetic
KEVVDRLREIITDLVRKLEENVKRLEEIIKRLEEELKRNVDRLRENSKRLAERLRT

SEQ ID NO: 23383 - protein, 57 aa, Artificial Sequence
  Synthetic
SEAEKVLEEVRRLIEEIRRRLKETTDDVRRLVRELKEEAKRLLEEDKRLVDDLRRRN

SEQ ID NO: 23384 - protein, 56 aa, Artificial Sequence
  Synthetic
KEVVDKIRKVAEELKKELKDNADRVRRIAERLKEELKRVAEKSDRIIRTLEEELKR

SEQ ID NO: 23385 - protein, 57 aa, Artificial Sequence
  Synthetic
SEVERLVREVEKDLERERRRLEKTVRDSERLVRELKETLDRLLKRDKDVVDDARRKN

SEQ ID NO: 23386 - protein, 56 aa, Artificial Sequence
  Synthetic
KSVVDRLREIVKELKDRNRKVVKELEDIHRDSDRELDDVVRRSDEIIRELVERLKT

SEQ ID NO: 23387 - protein, 59 aa, Artificial Sequence
  Synthetic
DLEEIIKTIREINERLNRRVREVEERLRRTSRELEERIRDVVRKLREINDRLRKEVEAR

SEQ ID NO: 23388 - protein, 55 aa, Artificial Sequence
  Synthetic
ERLVRENEEAVKRLTKELDDLLRKNEELIRRLEEEAKRVLERNEKIARDVREELK

SEQ ID NO: 23389 - protein, 59 aa, Artificial Sequence
  Synthetic
DLEEIIRKIREINRELNETVKKVVRELEEDTRRVKRRIEEIVKELERTTRELDKRVKDS

SEQ ID NO: 23390 - protein, 55 aa, Artificial Sequence
  Synthetic
EKLVEDNRKEVRDLEEEARKLLRENHELTKRLIEEAERILKKNEELIRKIEEEER

SEQ ID NO: 23391 - protein, 59 aa, Artificial Sequence
  Synthetic
SLEELLEELERILREVEERIKEVVRRLEEDTRRVEEEIRRIVEELKRINRELEELVRRT

SEQ ID NO: 23392 - protein, 55 aa, Artificial Sequence
  Synthetic
ERLVKEVRDTVKELEDELKELLDRNHELTRRLEEEAKRLLEENKKRADDVKEELR

SEQ ID NO: 23393 - protein, 59 aa, Artificial Sequence
  Synthetic
RLDEVIRRVEEVIRDVERRVAEVVKRLRDSSKTVKEKIETVIRRNKEINKRLEDLIRES

SEQ ID NO: 23394 - protein, 59 aa, Artificial Sequence
  Synthetic
EDDLRRTLEEVKRTIDKLKEDAERLLEENKDLIRRLEEELKESSKRNDTLVKKLKKELK

SEQ ID NO: 23395 - protein, 60 aa, Artificial Sequence
  Synthetic
REMEEALKRNNELSERLRRELKRVLEENHRLSRDLEKKLRDLLERVRELVERLDRMKEEG

SEQ ID NO: 23396 - protein, 59 aa, Artificial Sequence
  Synthetic
EEVRRVLEEIRRDTEELEKDARRVLTELRRNLERLRRKVEKVLEEIRRILEELERRVRK

SEQ ID NO: 23397 - protein, 60 aa, Artificial Sequence
  Synthetic
DKLEKLEEKLEKDVRRWDDELRRDLEDSKRLVDTIRKRLEKLLRDHRELVRRIRELLRDG

SEQ ID NO: 23398 - protein, 55 aa, Artificial Sequence
  Synthetic
EVVRRLEEEVRRLEEKVKEVLRRNEEEVRRLEKDIERVLRESTKIVEDLKDEVRK

SEQ ID NO: 23399 - protein, 60 aa, Artificial Sequence
  Synthetic
SVEEVVEELERIHREVKREIDEVVDRLREINEEVRREIKEVLDKIREDLERLKEEIDRDL

SEQ ID NO: 23400 - protein, 59 aa, Artificial Sequence
  Synthetic
DDILREMLRKSEELVRESREDLKRLLEEHRKLVEESRRELERLKKEVKDAVEEVRRRLK

SEQ ID NO: 23401 - protein, 60 aa, Artificial Sequence
  Synthetic
SVEEVVEELKKIHEDVKRKIDEVLKRLKRINDELRKRIREVLERLRREAEKLMEAIRRDA

SEQ ID NO: 23402 - protein, 59 aa, Artificial Sequence
  Synthetic
DDILREMLKESKELVKRSEKTLRELEKRHRDLVREVEETLKELEREVERKVREVERRVR

SEQ ID NO: 23403 - protein, 60 aa, Artificial Sequence
  Synthetic
SVKEVLDEIRKINDDARRRLEEVLKDLKRINDELKERVDRVHDRNRRLLEELKKEIRTKL

SEQ ID NO: 23404 - protein, 59 aa, Artificial Sequence
  Synthetic
DDILREMLERNKELVKESKKVLEELEREHRELVREVKKRLDDSTEKIKTEVDKVKKELD

SEQ ID NO: 23405 - protein, 60 aa, Artificial Sequence
  Synthetic
SVEEVIKEIEKIIRDLKEELKKVLTELEKRNEELKRRVEEVHEESRRLLDTIRKEIERKL

SEQ ID NO: 23406 - protein, 59 aa, Artificial Sequence
  Synthetic
DEVLEELLRRVKKTVKEVREDLDRLRKEHEELVDRVREELERSLREIKERLERIKRRLD

SEQ ID NO: 23407 - protein, 59 aa, Artificial Sequence
  Synthetic
KEAEELLEKVRKLVKEIEDRLRKSSEENRELVKRVEDELRETTKKNKKLVDEIKERREK

SEQ ID NO: 23408 - protein, 56 aa, Artificial Sequence
  Synthetic
EDVLRRIEEILERVERAVREVLRRNKEINDRLRERVEDVVRKNEDILRRVLDEVRK

SEQ ID NO: 23409 - protein, 59 aa, Artificial Sequence
  Synthetic
DEVERLIEEVDKLVKTIEEELRRSSEKNKDAVRRVKRRLEKSNEDNREVVRRVDKERRD

SEQ ID NO: 23410 - protein, 56 aa, Artificial Sequence
  Synthetic
EDVLRTIKEILRELRERVEEVAKRNKEINDRLNEDVERVVRENKELNDRLRERVDR

SEQ ID NO: 23411 - protein, 60 aa, Artificial Sequence
  Synthetic
DEAEKLIEEVKRLVEDLERKLDESSRRNEETVKRIDKELKDSNKKNRDTVKKVTDTAKDS

SEQ ID NO: 23412 - protein, 56 aa, Artificial Sequence
  Synthetic
EDVLRTIKKILDDLERRVEEVVRRNREILKDLERKVRRVFEENEKLNRELEERVKT

SEQ ID NO: 23413 - protein, 60 aa, Artificial Sequence
  Synthetic
SKADEVEKDVDRKLKEVKKRLDETRESVRRKLEEVRRELEESEKSVETVLREVKKTKDRG

SEQ ID NO: 23414 - protein, 56 aa, Artificial Sequence
  Synthetic
EEVLKKLKDIATELRERLDRNNKELTDIHRELKERLDRNNTKLSEIHKRLEEELDK

SEQ ID NO: 23415 - protein, 60 aa, Artificial Sequence
  Synthetic
SEVDEARKRVRDVLEEVRKALEETEKSVRRTLEEVEKRLKESEDSVRKVLEDVRRELERG

SEQ ID NO: 23416 - protein, 56 aa, Artificial Sequence
  Synthetic
EEALRELEEIARRLERELEKNNKDLTDIHETLRRRLEDNNRKLSKIHEDLARELRK

SEQ ID NO: 23417 - protein, 58 aa, Artificial Sequence
  Synthetic
KEAEDMLREVKRLIDRIKKVLEDVLKAIEELIRRLEDIHRKVNEDSERLTEDLKRTIG

SEQ ID NO: 23418 - protein, 59 aa, Artificial Sequence
  Synthetic
KEKIEELLRRVEELIRRIEEEVRKLLEDVERKIRESVKEAEELLRRSKKEIERVKREDT

SEQ ID NO: 23419 - protein, 58 aa, Artificial Sequence
  Synthetic
SEAERVIRESERLTDELRKELEKALRRSKKLSDELRKIHEDANREVRKLIEDLKRTIG

SEQ ID NO: 23420 - protein, 59 aa, Artificial Sequence
  Synthetic
EEILKKLLDESRDTVRRVEDTVRKLVRRSEEFVRKSKERVKRLLDDVRRKIEDVKRKTK

SEQ ID NO: 23421 - protein, 59 aa, Artificial Sequence
  Synthetic
DEEERLLREAEEMHERNKRLIDKLRREVEESLKEVEREIRRLLTDIARLVRRVEELKKN

SEQ ID NO: 23422 - protein, 55 aa, Artificial Sequence
  Synthetic
EEVLREIRKLVEESRKILEKVIRDWRRITEELKDRLRRVLEELKKLVDELRKTLT

SEQ ID NO: 23423 - protein, 59 aa, Artificial Sequence
  Synthetic
SDRERLLEEIKDLNRRNKEILERILRRSEELLKKAEDLLDKIKRDSDRAARKVEELKRR

SEQ ID NO: 23424 - protein, 55 aa, Artificial Sequence
  Synthetic
EEVLRRLEKIVRDSERELRRVREEDKKVADEIREKLKRVHDESERIVRELKETLR

SEQ ID NO: 23425 - protein, 60 aa, Artificial Sequence
  Synthetic
KELEDVKKRVDDLLRENERVVRELLESSKRLNEENEEAVRRLDESSKELAKRVKEIKDRG

SEQ ID NO: 23426 - protein, 58 aa, Artificial Sequence
  Synthetic
RDVRRVLEFVKEVIKEIERIHKKVNDDNRKLIEESIRRLKKVLDDNKRVIDELRKTLK

SEQ ID NO: 23427 - protein, 60 aa, Artificial Sequence
  Synthetic
DEEEEVKKRVEELLDELRKSIKKSVDDSKRVLDEARKSVERSREELEKLLRALEDILRKG

SEQ ID NO: 23428 - protein, 56 aa, Artificial Sequence
  Synthetic
LRRLEEEAKRLVEEVRRRDEEHLKRSEELLKEVEERDRELLKRARDLFEDVRRKIE

SEQ ID NO: 23429 - protein, 60 aa, Artificial Sequence
  Synthetic
SEKEEVAKRLEEALKRLEDTIRKVSEENERVLRTLEDRARKSAEKVERLLEELRKRLEDS

SEQ ID NO: 23430 - protein, 56 aa, Artificial Sequence
  Synthetic
LEELKKRVEELTREVEEEIRRLKETSKRLEEEVKRLIEDHDRRVRELKDEVERRIR

SEQ ID NO: 23431 - protein, 57 aa, Artificial Sequence
  Synthetic
DEAREVIKTLRKLLRDSAEILTRVTEEDREVLRELAEIIKKVTDEDRRVLEEARREL

SEQ ID NO: 23432 - protein, 59 aa, Artificial Sequence
  Synthetic
DRILEELLERIKRLHEENKKAVDRWREESKKLKEEVKKKVKEWKDTSEELLRRVKERAR

SEQ ID NO: 23433 - protein, 57 aa, Artificial Sequence
  Synthetic
KEVEEVIKTLRRLSEKLAREHKKVIDELRDLLRRSEEELKRVAKADEDLLDEIRRKV

SEQ ID NO: 23434 - protein, 59 aa, Artificial Sequence
  Synthetic
EEILEEVKERIDRLVKENKEIVDRSRELAKELHDRNREMLTKWLEDSKRLVEEAEKKAR

SEQ ID NO: 23435 - protein, 59 aa, Artificial Sequence
  Synthetic
DKEKEVTDELRKAKRDNDEVVKEIEKESRRLLEEVKETVKRDKKVLRELEEEVKEAKKK

SEQ ID NO: 23436 - protein, 55 aa, Artificial Sequence
  Synthetic
KKVLDEIRKVLTEAKKMHDDVLRRDREVLETARKLSEDSKKENEDVLRKVAEELR

SEQ ID NO: 23437 - protein, 58 aa, Artificial Sequence
  Synthetic
DEERDLERKLEEVIRRAKETSERLNRELERVIEEVRRRHEEAKRRAEEVIRRILKRLG

SEQ ID NO: 23438 - protein, 56 aa, Artificial Sequence
  Synthetic
KDEVDELVERLKRDIDRWAEDVKKLIEDLRRMVERNLREIDKLLKDLKRVVDETKK

SEQ ID NO: 23439 - protein, 60 aa, Artificial Sequence
  Synthetic
SEADKLLDEVRKRVEDMERRLEELVREDRKLVEDHHRDNKRLLDRVKKLAEDMERLIDRG

SEQ ID NO: 23440 - protein, 59 aa, Artificial Sequence
  Synthetic
SEKAEDVRRRLKELAERVRRVVRRVEEESKRTLKELEKSSKELAKKLRDLVETVERRLR

SEQ ID NO: 23441 - protein, 60 aa, Artificial Sequence
  Synthetic
SRVDDLLREAERLAEEHHRLNKKLVDEDRELVRRHHETNRRVLEEVKRLVEEAEKLIRRG

SEQ ID NO: 23442 - protein, 59 aa, Artificial Sequence
  Synthetic
SEEAKRVAERVRRLLERLRESSKRVKETSKETLERLRRSSEKVEEDLRKLIEDVERAAR

SEQ ID NO: 23443 - protein, 60 aa, Artificial Sequence
  Synthetic
RELEELVKRDREEVRKHHELNKELLDRARKLVRDHHERNKRLVREDEELVREAKELIERG

SEQ ID NO: 23444 - protein, 59 aa, Artificial Sequence
  Synthetic
SDEARKAKRESERTLKELEESSREVEKELRRLLKELRESSKKVEDDSRKSLERVERALR

SEQ ID NO: 23445 - protein, 60 aa, Artificial Sequence
  Synthetic
SKADELVKKDREKVEEMERRLRKILREVEELVKEHHERNKRVLDEVKKRVDDAKELIKRG

SEQ ID NO: 23446 - protein, 59 aa, Artificial Sequence
  Synthetic
SRKAEEVEKDSRRTLERVKDVLRKVEETLRELLDRLRESSERVTEALKRLMEEVREALR

SEQ ID NO: 23447 - protein, 61 aa, Artificial Sequence
  Synthetic
SKLEALVKEVEELVKKAKKDLDRLVEEDKKLAEEHHDRNRKLVDTVRELVERAKEDIDRRG

SEQ ID NO: 23448 - protein, 58 aa, Artificial Sequence
  Synthetic
KELEEVVKELRRLLKELEEVVRRVARESEKSLEEVRRSSEEVKKALDKLLKELEDAVR

SEQ ID NO: 23449 - protein, 59 aa, Artificial Sequence
  Synthetic
SELERIVEEVKKLVEDHKKKLKDIVEEVEELVRRHEKKLEDILRRNEKRVRELKEEVRR

SEQ ID NO: 23450 - protein, 59 aa, Artificial Sequence
  Synthetic
RKKAEEVKRRLEELLKEANKASEEVKRTLDKLLEDVNRESERVERASDELLKRLRDDAR

SEQ ID NO: 23451 - protein, 61 aa, Artificial Sequence
  Synthetic
SELEELVKTVKKLVEDHKRRLKELLERARRSTEDLKRKLEKLVRDVRKLVEDAKDAIRKSG

SEQ ID NO: 23452 - protein, 59 aa, Artificial Sequence
  Synthetic
KDELKKVEDALRRLLEELNEVSEEVERALRELHREVEEAIRRVEKELDRLLKEVEDAAR

SEQ ID NO: 23453 - protein, 59 aa, Artificial Sequence
  Synthetic
RELEEILKESEKSVEDIKRELEKIKKKSKTDLEKWKDDLRKIRKEIADLVRKVTREVED

SEQ ID NO: 23454 - protein, 58 aa, Artificial Sequence
  Synthetic
EKVKRVLDELKRSLEEVRRALEEVREVLRESLKRLRDLAEDLKRELRELLKELEERAR

SEQ ID NO: 23455 - protein, 60 aa, Artificial Sequence
  Synthetic
SEKEDVERRIRRLIERLRRMIEELRRRNTDILRKVRELVEEVKKADERSIREVEKLLRDV

SEQ ID NO: 23456 - protein, 56 aa, Artificial Sequence
  Synthetic
LDELIERAERLVREIERKLRKAIEDSKDLLRRIEERLRRLIEKSEKLLRDIKREVD

SEQ ID NO: 23457 - protein, 61 aa, Artificial Sequence
  Synthetic
SEIEKLVKEIEDHLRRLKEEIEKSSRELKKHLDELERRADKIVRDLRRLVEEIKDTIRREG

SEQ ID NO: 23458 - protein, 59 aa, Artificial Sequence
  Synthetic
REAVERLRKALKESKERLKKALEDNRRTLKKSEEDLKKVMEEVKETLDRVKKEVERALD

SEQ ID NO: 23459 - protein, 61 aa, Artificial Sequence
  Synthetic
SEIEKLARDAEEHLRRLLEELRKSSDDLRRHLEELKKKLKEIVDRLKELVDRIKDTIRREG

SEQ ID NO: 23460 - protein, 59 aa, Artificial Sequence
  Synthetic
KKVIDDLRRILEESARRLKRAAERNDETLKESADRLRRAIDRLREVAEKLSRDVRRAAK

SEQ ID NO: 23461 - protein, 61 aa, Artificial Sequence
  Synthetic
SEIEDIARRLREHLEDLKKKIKDSSDELRKHLEEVKRRIERTSEKLTDDVRKIEEKIRKDG

SEQ ID NO: 23462 - protein, 59 aa, Artificial Sequence
  Synthetic
EERIRDLEKILEDSERELRDMARKNRETAERSERELRKVLRENDRTAKKLTDDVRRTAK

SEQ ID NO: 23463 - protein, 61 aa, Artificial Sequence
  Synthetic
DEIDKLVEDVERHLEKLLREIERSSEELKKHVEDLREKLRDLVRRLKEVVDEIRKTVRDKG

SEQ ID NO: 23464 - protein, 59 aa, Artificial Sequence
  Synthetic
KEDVDRLREMLERSRRRLKRAADENRRTAEKSRKELKEVAERVRRALERMRREVEEELR

SEQ ID NO: 23465 - protein, 61 aa, Artificial Sequence
  Synthetic
SEIEEIAKKLEEHVKRVVEEIRKSSEEAKRHVEDVKRKIEELVRELARLVKEIKEAIRRDG

SEQ ID NO: 23466 - protein, 59 aa, Artificial Sequence
  Synthetic
KERIDELREIAKRSRDKLKKVADENRRTLEKSLRDLARAVEELRRRAKRLEEEVRRERT

SEQ ID NO: 23467 - protein, 61 aa, Artificial Sequence
  Synthetic
SDIERLVEEVEKHLKELEDEIRKSSEELKRLAEEISRDIRRTSEELKKLIEDIKDTIRRDG

SEQ ID NO: 23468 - protein, 59 aa, Artificial Sequence
  Synthetic
KEKIDRLRKILEESEKRLEELARENERTVKEVKKEIDDMVRENEETAKRLLDEVRETLR

SEQ ID NO: 23469 - protein, 56 aa, Artificial Sequence
  Synthetic
DELEKLLEDLRRKIRKIKEDLRKTSKENRDELRKSKKRLEDLVREVRRLVEEIRKL

SEQ ID NO: 23470 - protein, 55 aa, Artificial Sequence
  Synthetic
EEVEKTLRELIKEIEKVLEDDERTVRELIERNKELLDRLAKEVDRLIEEIKREAD

SEQ ID NO: 23471 - protein, 57 aa, Artificial Sequence
  Synthetic
SEADKVRKELDDVRRRVKKALDDIRRELEKLVKEVEDALRDHERSNEELVREVREKL

SEQ ID NO: 23472 - protein, 55 aa, Artificial Sequence
  Synthetic
DRVVEEIRDMMRKLKRELERIVEEAKKVVEDLKRRLEEVSRRSADLVRRLKERAR

SEQ ID NO: 23473 - protein, 55 aa, Artificial Sequence
  Synthetic
SDLERVKKDLEDVVRRVEEVLREHKRTNDEIIREIERLIEELRKENERLAREVRD

SEQ ID NO: 23474 - protein, 55 aa, Artificial Sequence
  Synthetic
ERVVDEIRKVVKELEERLRRLSEESRKLVKDIKEKLDKLAEDSRRLVEKLERDAK

SEQ ID NO: 23475 - protein, 61 aa, Artificial Sequence
  Synthetic
REFEELVERVKRVVEELTRRLRETSEETKTVLEKLRKELEEASRRIEDVLRRLTEKIRKDG

SEQ ID NO: 23476 - protein, 55 aa, Artificial Sequence
  Synthetic
EELEETLERLVEAIRDALRKDEETMRRVAEAIRRLLEDHRRSLEEVLEKIRDALR

SEQ ID NO: 23477 - protein, 61 aa, Artificial Sequence
  Synthetic
SEAEKIVEDIRRVIRELKEKLKKTSEDTEDTVRKLSRRLRELAKRSAELVERVTREIRKDG

SEQ ID NO: 23478 - protein, 55 aa, Artificial Sequence
  Synthetic
EELEETLRRVAEEIRRLLEEDRETLRRVERKIREMLKELEEINRRLIKEVDEEVK

SEQ ID NO: 23479 - protein, 61 aa, Artificial Sequence
  Synthetic
DEVEEIVRRIEEVLKDLRRRLETLARESRDLVRKIKEELRRHSDESRRLLERIKERIRRDG

SEQ ID NO: 23480 - protein, 55 aa, Artificial Sequence
  Synthetic
DELKKEADRVKKEIRDMLRKLKKINDDLIREIEEALKDNERTNREIIRRIEEELR

SEQ ID NO: 23481 - protein, 61 aa, Artificial Sequence
  Synthetic
DEAEKIVRDIEETVRRLARELEKHSEDSRRLVERIKEELTRHSKKVADVVRELKKRIKRDG

SEQ ID NO: 23482 - protein, 55 aa, Artificial Sequence
  Synthetic
EELEKRMRRLVKEIERMLEENKRTNEELVREIEEALKKNEETLRRLKREIEEALR

SEQ ID NO: 23483 - protein, 56 aa, Artificial Sequence
  Synthetic
SEAEELVKDAERVVEELERRLRKVSEDIDREVKKIKRELDEHSKRVKETVDDVRRR

SEQ ID NO: 23484 - protein, 55 aa, Artificial Sequence
  Synthetic
EELKKRVEDLIRTIKELIKRHDDSVKEVEKRIREMLERNRKSVEEVIEELKRTSK

SEQ ID NO: 23485 - protein, 61 aa, Artificial Sequence
  Synthetic
SELEELVKEVKELVDRSKEELKKLSEELKKLLDDLIKRIEDLSRRSKRLVEELRRRVEERG

SEQ ID NO: 23486 - protein, 58 aa, Artificial Sequence
  Synthetic
EEMKRVEEELKRLREEDREAVERHDESIRKLREDLRRAVETHKKSNRDLLREVEETVR

SEQ ID NO: 23487 - protein, 59 aa, Artificial Sequence
  Synthetic
DEVEELIRKIEDLLRRIEEKVTKAIRKSERLLEEIKKKIKEMIDKSERLVEEVERRTRN

SEQ ID NO: 23488 - protein, 55 aa, Artificial Sequence
  Synthetic
EDVKRVLKKVADDVERLLRDLERRNRKVREDVKRVLEELRKSNERSIRRIDETLR

SEQ ID NO: 23489 - protein, 59 aa, Artificial Sequence
  Synthetic
REIEEIIKRARELLEEVEEEWRRLIEKSRRLLEELKKRWDKLIEKSKDLLRKIEKTTKD

SEQ ID NO: 23490 - protein, 55 aa, Artificial Sequence
  Synthetic
DELRKILKRVEDENRRLVEEVERSNRRSMEENERLAEEVRRSNKDVIDKIRERLR

SEQ ID NO: 23491 - protein, 60 aa, Artificial Sequence
  Synthetic
DELERLSESVKKAERRIERLNEELNERVKEVTKAIDDLNKRLNDESKRVKEELRKVLARS

SEQ ID NO: 23492 - protein, 59 aa, Artificial Sequence
  Synthetic
EEVIKRVLDDVERAVDEVRKLIEDVLKEHEDILREVKKELDKAIERHKEILKRVREDIK

SEQ ID NO: 23493 - protein, 60 aa, Artificial Sequence
  Synthetic
SVLEDLARKVERVIREAKKVNEELNRRSEEVRRRADEVVADLNRESKKVDDELKKVLARS

SEQ ID NO: 23494 - protein, 59 aa, Artificial Sequence
  Synthetic
EEVARRVVEELKKVLKEIEDEIRRVIERHKEALDEVRRLVKELKDRHDKILREVREKIR

SEQ ID NO: 23495 - protein, 60 aa, Artificial Sequence
  Synthetic
SSEDRLRETVEDVIRRARDANRELNKASRDVEEESKKLNKELNDRSRKVERDLEEVLRRS

SEQ ID NO: 23496 - protein, 59 aa, Artificial Sequence
  Synthetic
EEVIERLIRDLRRVLEEIKREIEEALRDHERVLKENEDMVREILRRHEEILKRMTDEIR

SEQ ID NO: 23497 - protein, 60 aa, Artificial Sequence
  Synthetic
SVLERVADELRKVEEAIDRLNKELNDAVERVERESRRVNKELNDASERVERELDEVLKRT

SEQ ID NO: 23498 - protein, 59 aa, Artificial Sequence
  Synthetic
EEVAKELIDRIRKLLDDIRRKLEEVLKRHEEVLKRNEDTIRKVLKRHEEILEKVKRDIK

SEQ ID NO: 23499 - protein, 60 aa, Artificial Sequence
  Synthetic
SSKERLREAVERVERESDKVNKELNDKSRRVTEELRKLAEELNRRSKEVEEELDKLLARS

SEQ ID NO: 23500 - protein, 59 aa, Artificial Sequence
  Synthetic
EEVIRRLIEELDRLLEENDRRIKKAIEDHKRILEKAEREVREILRRHEKILEDVREEIR

SEQ ID NO: 23501 - protein, 57 aa, Artificial Sequence
  Synthetic
DEEEDLRRAIERVIETVRRLVERVEEESKRVADELRKLTKRLEEVVRKVDEDARKEV

SEQ ID NO: 23502 - protein, 54 aa, Artificial Sequence
  Synthetic
DVKRRLEELLKRAKEVLDELIKRHRDLLRRHEEKVRRLIKRIEDLLRELSKKAK

SEQ ID NO: 23503 - protein, 57 aa, Artificial Sequence
  Synthetic
SKEEELEKIVRKIREDLRRAVKEVEDESKRVLESTKKALDTIRRVSEKVIEDLRREL

SEQ ID NO: 23504 - protein, 56 aa, Artificial Sequence
  Synthetic
VDELVRRLEELLKELRKRLEDLIRRHEDINRRNHELIRRAIEEHRRLLREAREREK

SEQ ID NO: 23505 - protein, 57 aa, Artificial Sequence
  Synthetic
DEIEELIKKLREDLDRSRREVEKNSEDLKELIKRSEERIEKLIEDLERMVDDARRKN

SEQ ID NO: 23506 - protein, 59 aa, Artificial Sequence
  Synthetic
EKLLKKLEDVIDDVRRRDEDVVRKNEESLKRIEKRDEELIRKIEEVIRRAERKVDEVMR

SEQ ID NO: 23507 - protein, 57 aa, Artificial Sequence
  Synthetic
SKIEELIKELEKLSRTNEELVKRVLEELTRLVEESAKRIEDIIRRLKEVVDKARREN

SEQ ID NO: 23508 - protein, 59 aa, Artificial Sequence
  Synthetic
KKLLDKIKKAIEDLERENERALKELEKRLRELLRTDRELIRKIEEEIKKLRREVEEVLR

SEQ ID NO: 23509 - protein, 60 aa, Artificial Sequence
  Synthetic
SIKERLTEVLKRLAEEIRKVIEENKRTVDRAREEVERVIRKNREVLKRIKERADEVIKRI

SEQ ID NO: 23510 - protein, 59 aa, Artificial Sequence
  Synthetic
ERVVEELIREAKKIVEDIVRRVKRHSREVERIVEEIRRRAEEHIERLKRSLEEVEKKVD

SEQ ID NO: 23511 - protein, 60 aa, Artificial Sequence
  Synthetic
RIMEKLEEVLKELRKKIKKLNKDNEETVRRIKKEVDKVIKKNRDVNERIRKRLEEVISRI

SEQ ID NO: 23512 - protein, 59 aa, Artificial Sequence
  Synthetic
EEVVEKLIEDMERVVAESAKENKKHSDDVKRILDEIRRKAEDHIRKTEELLRRIEERTR

SEQ ID NO: 23513 - protein, 60 aa, Artificial Sequence
  Synthetic
SIKEKLTEELERLAKRIREANEDNKRTVEEVEKRIREVIKKNRDSNKEIKDDVERVLSRI

SEQ ID NO: 23514 - protein, 59 aa, Artificial Sequence
  Synthetic
EEVVERLLKKMREAVKKSEDENREHSERVKRIIEKIAREAEEHSKRTKELLDRIREEVR

SEQ ID NO: 23515 - protein, 60 aa, Artificial Sequence
  Synthetic
RVDEDLKRVLDELKKRVEDLNEENKKTVEDISRRVREVIKRNEDMLREVKKRAREAISRI

SEQ ID NO: 23516 - protein, 59 aa, Artificial Sequence
  Synthetic
EEVVRELIKKMRDVVRKSEKDNKDHSERVKRILKRIEERAREHTRRLEEVLRKVEEDVR

SEQ ID NO: 23517 - protein, 61 aa, Artificial Sequence
  Synthetic
RVKEKLREVLERLEREIRKILKDNKETVKRIEEEARRAVEKNKEALKRLEDRVRELLEDKD

SEQ ID NO: 23518 - protein, 59 aa, Artificial Sequence
  Synthetic
EEKVERLAEELRKIVRKIIEDVRKHSEDVRKILEDVKKEVDDHVREMEEIVKRLEDEIR

SEQ ID NO: 23519 - protein, 60 aa, Artificial Sequence
  Synthetic
SELEEIVKEIKRILDEHEKKVRRNSEEMKRIVDRHAERVEKLIREIEELLRRLDELVKRG

SEQ ID NO: 23520 - protein, 56 aa, Artificial Sequence
  Synthetic
EEDLERMAREIKDRLDKIDEENKKSSEELKRELDRLDEKLRDVARRIMEAIDERTR

SEQ ID NO: 23521 - protein, 60 aa, Artificial Sequence
  Synthetic
DELREIVRRIEKILEDHARTIEEVIERIRDILRKHEKLVEEVLRRIEKLLKELEEMVRRG

SEQ ID NO: 23522 - protein, 56 aa, Artificial Sequence
  Synthetic
TEDLERMAERVKRELERLNKKAEDALREVKRALDDLDRDLKRVLEEIKERIRRATT

SEQ ID NO: 23523 - protein, 60 aa, Artificial Sequence
  Synthetic
SELERILTEIEKRIEEHERRIKENSKRMKEIVDDHERKVEEVLRRIRKLLRDLEEMVKRG

SEQ ID NO: 23524 - protein, 56 aa, Artificial Sequence
  Synthetic
REDLEKVARDVEKRLEDANRENEKSSRELKRRLDELDKKLEEEARRIKKAIDDKTR

SEQ ID NO: 23525 - protein, 60 aa, Artificial Sequence
  Synthetic
SEVDEVAKEIRRILEEHEEEIRRNSEEAKRILDEHREKLKRNSDDMRRIVKEIEDMRRRG

SEQ ID NO: 23526 - protein, 56 aa, Artificial Sequence
  Synthetic
EEDLREVAERVKKDLDRLNRENDESSKEIEKDLKRLDDRNRDVSEKLKKEIDELTK

SEQ ID NO: 23527 - protein, 60 aa, Artificial Sequence
  Synthetic
DRLREIVKRIRDILKEHEDRIRENSKRARDILREHKRKIEEVLRRIEKLVEDLERLKRRG

SEQ ID NO: 23528 - protein, 56 aa, Artificial Sequence
  Synthetic
EEDLRRAAEEVKKKLDELNEENERSSEDVKRTLKKLNDELREKVRRVMERIDEAVR

SEQ ID NO: 23529 - protein, 60 aa, Artificial Sequence
  Synthetic
DEVEDVLRKIEKILDDHRKRIEKNSRDMARIIDEHRRKVEENSREMKKLVDDLKKAVDRG

SEQ ID NO: 23530 - protein, 56 aa, Artificial Sequence
  Synthetic
EEELKEVADRVKEKLDRLNRENEKSSEELKRELDKINDENRETSERLKREIDETTR

SEQ ID NO: 23531 - protein, 60 aa, Artificial Sequence
  Synthetic
DELREVVKTIEEILRDHERKVRDNSRRMKEIIKRVKEELERVIKEAKELVERLKEAVRRG

SEQ ID NO: 23532 - protein, 56 aa, Artificial Sequence
  Synthetic
EEDLRKMAEDVKRALDKINRDNEESSRRLKKELDDVLRKVEEVIRRLEEEIDRLTT

SEQ ID NO: 23533 - protein, 59 aa, Artificial Sequence
  Synthetic
SELEKIEEDIRRILKEHKDTVRKNSEDIDRSVKEVKERIDKILKEIDDLLKELRELVER

SEQ ID NO: 23534 - protein, 56 aa, Artificial Sequence
  Synthetic
REDLERVVREVKKELDDINRENRKSSEEAKKKNDDVLAELEKRIREIKRRIDEDAT

SEQ ID NO: 23535 - protein, 60 aa, Artificial Sequence
  Synthetic
SDLEKLVEEIKRLLKELKERVTKNSEDMKREVERHKELVKKLKKRIEDLLRELEDAVRKG

SEQ ID NO: 23536 - protein, 56 aa, Artificial Sequence
  Synthetic
REDLERVVEEVKKEIDKIVEENRDSSRKLKERLDEANEELERRVEEIERRIDEKAR

SEQ ID NO: 23537 - protein, 60 aa, Artificial Sequence
  Synthetic
DELREIVTRADETLKRVADKIEENSRRMEEIVREHERKVRELLKRIEKLVRDLSAMVRRG

SEQ ID NO: 23538 - protein, 56 aa, Artificial Sequence
  Synthetic
EEDLRRVVKRVKETNRRLLEKNKDSSRKLKKRLDEANKTLADALEEVKRRIDERRK

SEQ ID NO: 23539 - protein, 60 aa, Artificial Sequence
  Synthetic
DELDEIVKRAKETVEKVKREVDANSKDIERILREHRKKVDKNSKDMEDLVRKLEELVRRG

SEQ ID NO: 23540 - protein, 56 aa, Artificial Sequence
  Synthetic
EDELREAVERLERENRKVLEENRRSSEKVKRDLDRVNRENEEVSERLKKRIDEAAT

SEQ ID NO: 23541 - protein, 60 aa, Artificial Sequence
  Synthetic
SEIEKIIKELDDLVKEDEDTIRRLEEELRELLKEIDREAKKSDEELEKTLEELAKIARDG

SEQ ID NO: 23542 - protein, 55 aa, Artificial Sequence
  Synthetic
EELRRVLERVAEDSKRTLDRLERVLKEVERRVDEALKRNKTVLDKVREDVKRLKD

SEQ ID NO: 23543 - protein, 59 aa, Artificial Sequence
  Synthetic
REIEEMIKRNEKLLEDDKRKVKRIIEKLDKVLEDDRKRAEDLIRKLEKVAEEIARLRDK

SEQ ID NO: 23544 - protein, 59 aa, Artificial Sequence
  Synthetic
EELLDTLRKVNERVARESEKTIRELEKVLERVNRESKKTIEEVEKALKEVADRVTEVRR

SEQ ID NO: 23545 - protein, 59 aa, Artificial Sequence
  Synthetic
SEIEKLIKENKDLLEEDKRRVEEVIEKLERVIEEDKRRVDEAIKRLDDVAREIERLRKD

SEQ ID NO: 23546 - protein, 59 aa, Artificial Sequence
  Synthetic
EDLLRRLERVNEEVARRSEDTIRRLREVLKKIEDDSRRTIDELREVLKRVKTRVTEVRR

SEQ ID NO: 23547 - protein, 59 aa, Artificial Sequence
  Synthetic
DDIERLIKRNKDLLDRIREEARKLIERLKKVLEDDRRKVERAIERLEEVVDEVRKLKKD

SEQ ID NO: 23548 - protein, 59 aa, Artificial Sequence
  Synthetic
EEVLRKLKKANEDVEREVRKMIEEVRRVLRKVEEDSKRTIKKLKDVLKKVAEEMEKVRR

SEQ ID NO: 23549 - protein, 59 aa, Artificial Sequence
  Synthetic
DEVEEAIKELEDALRKDREAVERMIRDLERLADEDRREVEDHVKKIEELIAAVERMSRD

SEQ ID NO: 23550 - protein, 59 aa, Artificial Sequence
  Synthetic
REVLEKLKEVLKRVEKASRKTNEDVKRVLDEVRRISEETNRRNERVVEEAKERVERVAK

SEQ ID NO: 23551 - protein, 60 aa, Artificial Sequence
  Synthetic
SEVDEVIKRLEELVERHRRKVEEVIRRLEKLAEDHERKVRELEKRLRELIKRIEELARRD

SEQ ID NO: 23552 - protein, 59 aa, Artificial Sequence
  Synthetic
SRDFDRLEDVARRVKEDLERTDEEVRRVAEEVRKRVEKTTRDVERVVREVERAIEERRR

SEQ ID NO: 23553 - protein, 61 aa, Artificial Sequence
  Synthetic
DEAREVIKTLEKLLEEHERRVREVIKRLEELIKRHEDRVREVIETLKRLLEEAEKIVRRDG

SEQ ID NO: 23554 - protein, 59 aa, Artificial Sequence
  Synthetic
SEDMRRLEEVIRKVKEALKRTNDRLREVVDEVKKRLDKTDEDATRVVEEVKKRIDEAAK

SEQ ID NO: 23555 - protein, 61 aa, Artificial Sequence
  Synthetic
DEVETVIRRLEELIREHKEKVDRIIKELEKLLRKHEEKVKKVIEELRRLAKEAADIVRRDG

SEQ ID NO: 23556 - protein, 59 aa, Artificial Sequence
  Synthetic
SRDMERLERVIRKVEEDLDRTNREVEEVIRRVEEEVERLDREAEEVVRDVKEKIDRLKK

SEQ ID NO: 23557 - protein, 61 aa, Artificial Sequence
  Synthetic
SEAEKVIKELRDIVKRNDEVVKEIIRRLEELVKEHKRLVEEIIKRLRELLKRIEEVVRRDG

SEQ ID NO: 23558 - protein, 59 aa, Artificial Sequence
  Synthetic
SEDLKRLKDVLDEVIKKTDELLREVERKAREVTKRLRDLDRRVKEVADEVRRRIREATK

SEQ ID NO: 23559 - protein, 63 aa, Artificial Sequence
  Synthetic
EEEERVKEFLDRVDTEDKKLVEELRKVVERVKRENEKLIKESEDMSKKVEDDARRLIAELRRE

SEQ ID NO: 23560 - protein, 55 aa, Artificial Sequence
  Synthetic
KEVVRKLEEYLRRSRKLVDELKKKLRELLERSREKVERSKEELKRILEEVRKKAK

SEQ ID NO: 23561 - protein, 61 aa, Artificial Sequence
  Synthetic
SVSERLRRVLERVAREVKRLIDEDRKVNEEAEREVRKLIKKDEDALKRVAEEVERLIREAS

SEQ ID NO: 23562 - protein, 59 aa, Artificial Sequence
  Synthetic
EEIIEELIRRLEEIVKRLEEKHRTTVKKIEDIIRELKKTHDKTIEDLRRIIEEIEERVR

SEQ ID NO: 23563 - protein, 59 aa, Artificial Sequence
  Synthetic
RVREELRKVLKRAAEAVERVLRKNEEVLRRAEERIRRLLEENEKSLEKVERDVTRILEG

SEQ ID NO: 23564 - protein, 59 aa, Artificial Sequence
  Synthetic
EEKVKKLIREIEEVIDRLRRESEKHIEEIKEIITRLDKEVKDHDERLKREVDKLEERAR

SEQ ID NO: 23565 - protein, 60 aa, Artificial Sequence
  Synthetic
SVEERLRKVLEEVRRLLEKIIKDNREVLKRAEEKVRELIKRDKDVLDRIAEEVERLKEKG

SEQ ID NO: 23566 - protein, 59 aa, Artificial Sequence
  Synthetic
EEKVDRLIEELKKLIDDAREKNERHIEEIERIIDDLRRKHEETARRLKEAIDRLREEAQ

SEQ ID NO: 23567 - protein, 59 aa, Artificial Sequence
  Synthetic
DKEERIERVLKRVEEELKKLKERIEEVLKKVEDMVRKNLEEIRKVSEDHERTVREIRKR

SEQ ID NO: 23568 - protein, 59 aa, Artificial Sequence
  Synthetic
EKVVEEIIKELERLLEDLKRRADELIKRLEKLVEEHHRKVEELVRRLEESLDKVRRDAK

SEQ ID NO: 23569 - protein, 60 aa, Artificial Sequence
  Synthetic
SEDEKVKRVVEKVKEESDRLNEELKRVVDEVRKELERLIEKIKRSVERMDRTVRELLKRI

SEQ ID NO: 23570 - protein, 55 aa, Artificial Sequence
  Synthetic
DRVVEKLKKALDESRKTHKKLIDDLRRALEELEKRVEDLNRENERLLDEIKKRVD

SEQ ID NO: 23571 - protein, 59 aa, Artificial Sequence
  Synthetic
DVERKIEEVVRDVKRELDRLLEENRRSVERVERALDKLLEDSRRVVEEVKKALDDLRRR

SEQ ID NO: 23572 - protein, 59 aa, Artificial Sequence
  Synthetic
ETDVKKIIEDLRRLVREVEEHSRRTNRRLEELVKDLARHAKRSIDRLKELVDRARERAR

SEQ ID NO: 23573 - protein, 59 aa, Artificial Sequence
  Synthetic
DVEKDIERVVEDVKRELRRLLKEDRDVSKKVKDDLDKLLKESEEVVRRVKKELDRLREE

SEQ ID NO: 23574 - protein, 59 aa, Artificial Sequence
  Synthetic
KSAVDEIIRRLKELVKEMKRHVDKSIKDLEELVRRLEEHIRRSIERLKKLVEEAREDAR

SEQ ID NO: 23575 - protein, 59 aa, Artificial Sequence
  Synthetic
SVEEEVDKVVKKLEEDLDRLLEESKEVVERVEKALDDLLKRDEDVSEEVRRELERLKEE

SEQ ID NO: 23576 - protein, 59 aa, Artificial Sequence
  Synthetic
ESMVKKLLDELRKLVEDAREHVERSIRELEKLVKEADDHVRKSIEDLKRLVEEVRETAR

SEQ ID NO: 23577 - protein, 59 aa, Artificial Sequence
  Synthetic
DVEKEIKDVVDKAKRELDRLLREDREVSREVKEALDKLLEDNRRSVERVERELDDLRRR

SEQ ID NO: 23578 - protein, 59 aa, Artificial Sequence
  Synthetic
ESVVKEILKRLEKLVEDAKRHVEDSIRKLKKLVDDMRKHSERSNRDLERLVREAREKAR

SEQ ID NO: 23579 - protein, 59 aa, Artificial Sequence
  Synthetic
SVEEEIRKVVEEVKRELDRLLEKNDRSVKEAKKELDRLLEENRRAVEEVKKALDELEKN

SEQ ID NO: 23580 - protein, 59 aa, Artificial Sequence
  Synthetic
ESEAKRLIDRLRELVKRVAEHSERSDRELKKLVDDLREHSKRSNDDLRRLVEEAEREVR

SEQ ID NO: 23581 - protein, 59 aa, Artificial Sequence
  Synthetic
SVEDKVREAVRRAKEALKKLVEDDRRVVKEVEEMLDTLLDKNRDSVRRAKEKLEDLKRK

SEQ ID NO: 23582 - protein, 59 aa, Artificial Sequence
  Synthetic
ESDAERLIETLERLVKELEDHVRRSIRKLRELVEEMRDHSRRSDEELKKRLKEVEDRVR

SEQ ID NO: 23583 - protein, 59 aa, Artificial Sequence
  Synthetic
DVEEEIKRVVKKVEEELDKLLEDDERVVREVEEMLDRLLKKNEKVVRDAKRKLDDLRRK

SEQ ID NO: 23584 - protein, 59 aa, Artificial Sequence
  Synthetic
KDVVDKIIETLRRLVKEVAKEVKRSIDELKKTVEEVRKHSEETDRRIEKLAKEAEEEVR

SEQ ID NO: 23585 - protein, 59 aa, Artificial Sequence
  Synthetic
SVEEKIREVVERVRRMLEKLLEDNDRSVKEASKALDDLLRESRRVVEEVKKALDDLRRK

SEQ ID NO: 23586 - protein, 59 aa, Artificial Sequence
  Synthetic
ESEVRRIIRELEELVKRATDHVRRSDKRLRELVDELRKHIRKSIEDLKRLVDEARRRKD

SEQ ID NO: 23587 - protein, 61 aa, Artificial Sequence
  Synthetic
DEVEEIRKELEKLLEEVRRKLEKIIKDIRDLLREDKRKSERIDRELEKLLRRLEEIVRDRG

SEQ ID NO: 23588 - protein, 59 aa, Artificial Sequence
  Synthetic
EEMLREVKRVLEEVRRDIERLLEEIRKVVEEWRKRLEDLKKKNEDSAREVKRRIDELRK

SEQ ID NO: 23589 - protein, 61 aa, Artificial Sequence
  Synthetic
SEVEDIIRRLRELLERHREVSKRINDELRKLLREVEEDSRRLDKEIEDLLRRIREKVTRDG

SEQ ID NO: 23590 - protein, 59 aa, Artificial Sequence
  Synthetic
EDARRRVERVLREVEDTLRKLDKENEDSARRVKEALDRLLKKNEESIRRAEREIDELRR

SEQ ID NO: 23591 - protein, 61 aa, Artificial Sequence
  Synthetic
DDVEELKKEIKKLLDDHKKLSKELNEDIERLLREHRKLSEEIDRRLEKLLKELEELVRREG

SEQ ID NO: 23592 - protein, 59 aa, Artificial Sequence
  Synthetic
KELLDEVERVVREAKKTLDRVDEENKKSIEDAERELERMDRKNEKSVEDVRRTAKELLR

SEQ ID NO: 23593 - protein, 61 aa, Artificial Sequence
  Synthetic
SEAEEIIRRLEELLKKLKKDSDRLDEEIKRLLDENRRNSKDINRRLKKLLDDLRRLVRERG

SEQ ID NO: 23594 - protein, 59 aa, Artificial Sequence
  Synthetic
EDVLRRVEEALRRAEEDLKRLKEKNDRSLKEWRDTIRELKRENEESLRRVKEEADRLSK

SEQ ID NO: 23595 - protein, 61 aa, Artificial Sequence
  Synthetic
SDVERIIEELERLLEDLERRSKRIDEELKRAADRNRRNVEEIIRRLEDLLRRLEELVRRDG

SEQ ID NO: 23596 - protein, 59 aa, Artificial Sequence
  Synthetic
KDVLREVRRVAEKVRRSIKELKERNEKSLRDWKREVDKLLKDIKKVLDEVRKAADDLRK

SEQ ID NO: 23597 - protein, 61 aa, Artificial Sequence
  Synthetic
REVDEIRRRLEKEVERNRRNSKRIDDELKEMADRNRENVKRSIEEIKELLKRLKELVDRDG

SEQ ID NO: 23598 - protein, 59 aa, Artificial Sequence
  Synthetic
EDVRREVERVLKEWEDDVRRLLRKNEDSLREWREKLKKLVREHREVTKKAEEVLRELLR

SEQ ID NO: 23599 - protein, 61 aa, Artificial Sequence
  Synthetic
KDAEDIIRKLDELLDELAKAAREIIERLRDAARENEENSREINRRLEELLKRLEDAVRRDG

SEQ ID NO: 23600 - protein, 59 aa, Artificial Sequence
  Synthetic
EDVKRKVEEVARRVRKAIDDLLRDIKRVLDDWKRKVDKLLEDNRKSLEDVKREAERLRK

SEQ ID NO: 23601 - protein, 60 aa, Artificial Sequence
  Synthetic
SEVERLIKELEDVSRDIKREVTELKRDLKRLAEESKRLVEELEETIRKIVKDIEDTKRRG

SEQ ID NO: 23602 - protein, 59 aa, Artificial Sequence
  Synthetic
KELVDRVEEALRDHERTLRKVVKEVDKALKDLERDNTELVKRVKKVLDELRRDVEEKAK

SEQ ID NO: 23603 - protein, 60 aa, Artificial Sequence
  Synthetic
DMERKLDTVLEEVRRVVTRAKEANDRVLKDAKRVVEELSDRNRRVLEDAKRVVDELKEKR

SEQ ID NO: 23604 - protein, 59 aa, Artificial Sequence
  Synthetic
DEVVDKLLKKLKETLRRMEKESEELLRETEKILRELEKEVEDHLRTVEKTLEDLRREVE

SEQ ID NO: 23605 - protein, 57 aa, Artificial Sequence
  Synthetic
SEVDKILEDSKRKLEEVEEMVRRLLKKSRDLLEKLERDVERLIRDSERRLEEVARAK

SEQ ID NO: 23606 - protein, 59 aa, Artificial Sequence
  Synthetic
KDLRRKLKEVHDRSRRVIEKLREELEKVHDEARKVVEKITEKIERAHDKSRRLLEEIKR

SEQ ID NO: 23607 - protein, 56 aa, Artificial Sequence
  Synthetic
SEVDEFVKRSEDLLKKLEEDVRRIVRESERLLEEVERRVRKILRDLEKKLEDAERE

SEQ ID NO: 23608 - protein, 59 aa, Artificial Sequence
  Synthetic
KELRDKLEEAHRKVKEKVERLMEDLKRAHDESEKKIRDLKRKLREVLERLRKRVEEIKK

SEQ ID NO: 23609 - protein, 60 aa, Artificial Sequence
  Synthetic
DLEKRLEEAIRENRDTIRRLAKELERVIEDNKRRLEELKKEIKKVIEELERELRRVRKDG

SEQ ID NO: 23610 - protein, 59 aa, Artificial Sequence
  Synthetic
REIVDELVRRLKKHSDEARKTVEDLRRKSKKSLREAEETVKRLVEEIERLLEEIKETMR

SEQ ID NO: 23611 - protein, 60 aa, Artificial Sequence
  Synthetic
SEVDELVKKIEDSERRIEEKVKRIEDELKESEERIRTKVRELHKENEKLLEEIRRKKKDS

SEQ ID NO: 23612 - protein, 59 aa, Artificial Sequence
  Synthetic
DELRKTLKDALKRHEEVLKRVEERIRRVLKRHEEVLREAEERIRRSLEKLKRDADRVAK

SEQ ID NO: 23613 - protein, 59 aa, Artificial Sequence
  Synthetic
DEVEELVKELRDSLKRIREVAKELHDRNKELLDRIKRLVDELLKEIEKVLKEIEETKKD

SEQ ID NO: 23614 - protein, 59 aa, Artificial Sequence
  Synthetic
EEVRRKLEEAVREHERELERMAREIRKSLEDLKRVLEEVAERIKEVLRRLEKRVKEVED

SEQ ID NO: 23615 - protein, 60 aa, Artificial Sequence
  Synthetic
DEVEELVERLRRSLEKIRDRVRRLLERIKRLAEKIKRDIERLHKKNEDLAREMRKSERKS

SEQ ID NO: 23616 - protein, 59 aa, Artificial Sequence
  Synthetic
EELRKKLRKVVEDHKRVLEEVKDRLTKVLRELEEVLEKVKRDIKKSLEDLEKVLRELEK

SEQ ID NO: 23617 - protein, 59 aa, Artificial Sequence
  Synthetic
SDVERLLTKLKEVAKDLARIVKRLDEENEKLSEKAEREIRKLDRDNERLLEELEERKRR

SEQ ID NO: 23618 - protein, 59 aa, Artificial Sequence
  Synthetic
DRLRKKLKEVLDDLRRVLEELKDHIRRSLDKNRRSLEELEEHIRRSLTELRRRLEELAK

SEQ ID NO: 23619 - protein, 60 aa, Artificial Sequence
  Synthetic
DEVRELLERIEDEIRRIREEIKKLDEDNKKLAEDIRRKIEELDKENKELLKRIEDKKRES

SEQ ID NO: 23620 - protein, 59 aa, Artificial Sequence
  Synthetic
DEVRDRLRTILKKLREMLKEVKDRIDDSLRRLREVLDEVAKHIERSLKELKDRVREVEK

SEQ ID NO: 23621 - protein, 60 aa, Artificial Sequence
  Synthetic
SDKEEIKKVVDDVRRDIRRLEKELRDLNERFRKRVEELKKRLEEVNDRARREVERLKSRI

SEQ ID NO: 23622 - protein, 56 aa, Artificial Sequence
  Synthetic
VDTLKRRLEDVLRKAREEVEKWKEDLERLLREAERRVREYEEDTRRLLKELEDETR

SEQ ID NO: 23623 - protein, 56 aa, Artificial Sequence
  Synthetic
NVEDEVRRVVTELEKTLREVLKRSKEALDRLRETLERLLKELEDVHREANEDLTRL

SEQ ID NO: 23624 - protein, 59 aa, Artificial Sequence
  Synthetic
ESVVKRLVRELERLLREVEKHLEDSKRELEDLLRRLRERLEELKKRHEDLLREAREETR

SEQ ID NO: 23625 - protein, 57 aa, Artificial Sequence
  Synthetic
SLEETIEEVVRRNKETLDRARKKSEDVLRELERVLRELKRRTDEVARKLKEELDKLD

SEQ ID NO: 23626 - protein, 59 aa, Artificial Sequence
  Synthetic
EDVVRRLLEELERLSRDLERHVKRSEEEARDLLRKAREHVERSVKEIEDLLEDLKREAT

SEQ ID NO: 23627 - protein, 57 aa, Artificial Sequence
  Synthetic
SLEETVRKAVRRNRETLRRLKRESEEAVKEAKEVLDRLREETERVLRKLEKRLRELR

SEQ ID NO: 23628 - protein, 59 aa, Artificial Sequence
  Synthetic
KSMVDELLRTLEKLSDEIRRHVEKSKEDLERLLRELKKHVKRSVEEIEKLLEKLDKEAN

SEQ ID NO: 23629 - protein, 61 aa, Artificial Sequence
  Synthetic
SEVDEILKRIKEVLKRNKENVERIKKRIKEELDRNRKNVERILRTIEKLLKELEDIARREG

SEQ ID NO: 23630 - protein, 59 aa, Artificial Sequence
  Synthetic
EELRKKVKEVMDRWRETLDRLREEVERVLEDWRRKLEELRRRVEKVLRDAERVIKKVEE

SEQ ID NO: 23631 - protein, 57 aa, Artificial Sequence
  Synthetic
SEREEIERVLDENRRSLEELEREVEDALRTWEEELKKVEEAVRKVLEDVRRELEKDL

SEQ ID NO: 23632 - protein, 56 aa, Artificial Sequence
  Synthetic
VEKIKTEVDDLSRKLRETVERLKTELKKVIDRNRKTLEDLERRARKLIKEARDAAK

SEQ ID NO: 23633 - protein, 57 aa, Artificial Sequence
  Synthetic
REREKIEDLLRRNEKSLRDVARAVERILEEWRKVVEDLTERNKELLKEVEKVVRELL

SEQ ID NO: 23634 - protein, 56 aa, Artificial Sequence
  Synthetic
VDEIAKELKRLSDKLREMLKRLTDKAKRLIERNEKTSRDNERELRKLIKEAEDAAT

SEQ ID NO: 23635 - protein, 60 aa, Artificial Sequence
  Synthetic
SKEERLERLIEENKKSLDELSKRVEEVIKENKDVLKRLKEKIERLIEKNRRELERLKKDV

SEQ ID NO: 23636 - protein, 55 aa, Artificial Sequence
  Synthetic
EELERELRDHSRRLKEIVERIERKVREHIRELEKIVKEVEREVEEHIEKLERTVR

SEQ ID NO: 23637 - protein, 59 aa, Artificial Sequence
  Synthetic
SDEDRLRELLKKNRESLKRLSDEIRRLIEENRDALRRVKETIKELLRKLKEVVERVRKD

SEQ ID NO: 23638 - protein, 55 aa, Artificial Sequence
  Synthetic
EEVRKTLEEHSRDLRRKVEELAREVKRHIRELEKILKEVKDEIEEVIRRIEETAR

SEQ ID NO: 23639 - protein, 59 aa, Artificial Sequence
  Synthetic
SEIEDAAEKVRRNSEEAKRILDEHRERVKRVLEEIERLVKRAEERIEELIRTIERLRKD

SEQ ID NO: 23640 - protein, 59 aa, Artificial Sequence
  Synthetic
EEVRKKLEDILRKNEETSREIKKRLDRIDDDLRRVLEKAAKRLRDLLEKLREAVRRVET

SEQ ID NO: 23641 - protein, 59 aa, Artificial Sequence
  Synthetic
SEIEKVKKEVEENSREAKRIVDEHKRLVEENSKEMEKLLKEAEDTIRKLLKEIKELKDR

SEQ ID NO: 23642 - protein, 59 aa, Artificial Sequence
  Synthetic
ERMREKLRRALEENRRTSERLKRKLDDIDRDNERTSREVKEKLKRILEELKRTLEEVER

SEQ ID NO: 23643 - protein, 59 aa, Artificial Sequence
  Synthetic
SEIDKARDEVRKNSDEMRKIIERHREKVEDNSRRMKETVRRVEEEIERIIREIEELKKR

SEQ ID NO: 23644 - protein, 59 aa, Artificial Sequence
  Synthetic
RRLREELRRIAEENKKTSDDLKKRLDRIDKENERTSEELKEENDRLLEKLRRAADRVKR

SEQ ID NO: 23645 - protein, 59 aa, Artificial Sequence
  Synthetic
REIEEFEKDVRRNSEDMERIAREHEKLVRDLLRELKRLVDDLKRRLEELAEEIKSLREQ

SEQ ID NO: 23646 - protein, 59 aa, Artificial Sequence
  Synthetic
ERLRERLKRILDKNKETSDRIKKRLEDLNRELERVARELKKTIDELLRELEEVVERVRK

SEQ ID NO: 23647 - protein, 60 aa, Artificial Sequence
  Synthetic
SLEEEVKKLLEELKKVADKLTKEVREADKKLEEVLRRVKRRLDEVDRRLEEEIKKVKSRI

SEQ ID NO: 23648 - protein, 59 aa, Artificial Sequence
  Synthetic
EELLERLKRRIDRLIEEARRLVEKWRDELKKLIDEVRKLVEDHERKVRDIEKKVRDESR

SEQ ID NO: 23649 - protein, 59 aa, Artificial Sequence
  Synthetic
DAEEKARRVLEELDEALKRLAKKIKESIDKLKDVLRKLAEIIKRSLDELDEVLKRLASK

SEQ ID NO: 23650 - protein, 55 aa, Artificial Sequence
  Synthetic
EEILEELRRALEELKREVDELDRRNEEALERLKERVKRLNEDNRRTLERLEREVD

SEQ ID NO: 23651 - protein, 60 aa, Artificial Sequence
  Synthetic
DVEELLRRLLEELRRVVKEVEDINRRSLEEARRVLKRLEDDHRRVLKELEDVLERLRRQG

SEQ ID NO: 23652 - protein, 59 aa, Artificial Sequence
  Synthetic
RETIEELLRKVDRDLKRIRTTSEDLVRKNEELLEKLERESRRVVEESRKRLKEAEERTR

SEQ ID NO: 23653 - protein, 59 aa, Artificial Sequence
  Synthetic
SVEEKLKDLEKENKDSLDEIRKLNEDSLEEAKRVLKKLEDTHRTVLRKLEKVLDELRKR

SEQ ID NO: 23654 - protein, 59 aa, Artificial Sequence
  Synthetic
DDAIRKLRKKVEDTSRDLKRTSDDLVRRNRKLLKELEEESRKVVKESDEILRKMKEEVR

SEQ ID NO: 23655 - protein, 60 aa, Artificial Sequence
  Synthetic
SVEEKLDELEKRIKEVLERIERINEESLRRAEEVLRDLEETNRRALERVRDVLRRLEERG

SEQ ID NO: 23656 - protein, 59 aa, Artificial Sequence
  Synthetic
DDAIRKLLETVDRRLKELTETSKRLVEENRDLLRRAKEESKRLVDESEKVLEEMDRETR

SEQ ID NO: 23657 - protein, 59 aa, Artificial Sequence
  Synthetic
SADETLEELEKELRRVVDEVRRTNEEANKRLREVLRKLEKKNDDVLRDLERVLKELEDR

SEQ ID NO: 23658 - protein, 59 aa, Artificial Sequence
  Synthetic
EETIKKLREDVKRELDRIKTSSKKLVDDIERRLRRMEEESRKLAEDSRRILEEMRKEVT

SEQ ID NO: 23659 - protein, 56 aa, Artificial Sequence
  Synthetic
SEVEKLVDEIKKELKRLRETSKKLLDEIRELLERLKRSSKKLVDDIKRILEELKRR

SEQ ID NO: 23660 - protein, 56 aa, Artificial Sequence
  Synthetic
KDKLEKALRDARKVVEDIERTNREILKRVRDMVERIREDNDTVLEEVERMAEEVRK

SEQ ID NO: 23661 - protein, 61 aa, Artificial Sequence
  Synthetic
REIEELKKKVEKVLRELRKSSEEMKRRVEDLIRRLKKSSKDLERKVKDLLKKAEEKVRRDG

SEQ ID NO: 23662 - protein, 59 aa, Artificial Sequence
  Synthetic
EEARRRLEEVVRRLRKVLDDVRKINKEVVDRLKKALDEVKRTNEDVVRDLRKVLEELKT

SEQ ID NO: 23663 - protein, 59 aa, Artificial Sequence
  Synthetic
SEIEKLKEEIRRLLEEIKRHAEENKRRVETALRDIERHVEENTRRVAKVEEEIKKLKDR

SEQ ID NO: 23664 - protein, 56 aa, Artificial Sequence
  Synthetic
KDELDKVEEEAKRVAEEVKEIHDRVLEEVRRVVDRVLKAHDEVLRRLERVVREVKR

SEQ ID NO: 23665 - protein, 60 aa, Artificial Sequence
  Synthetic
EEEKRLRELEKRNEDVIRKAAEDVREILRKNEEVLKEAEDRIKRLIDEDRRVLEEVKRDD

SEQ ID NO: 23666 - protein, 55 aa, Artificial Sequence
  Synthetic
EELEREVRKHDKEVKEVIDRLREKSERHIREIERIVDELRKKHEATVRKLKKDVK

SEQ ID NO: 23667 - protein, 60 aa, Artificial Sequence
  Synthetic
DEDETLRELEKKNDKALDDARRTIEEVIRRNEEVLKRAAEEIEKLERKNKRVLEEVKRRD

SEQ ID NO: 23668 - protein, 55 aa, Artificial Sequence
  Synthetic
EELAEEVKRHDDRVRKEIEKLKREVEKHDREVKETIDRLAKKVDDHLKELRDTTR

SEQ ID NO: 23669 - protein, 59 aa, Artificial Sequence
  Synthetic
DEIKEIEETVERLVEELKRIVEEWREESKRNVDELEKRIRDIKRRIDEAIKTLEELKRR

SEQ ID NO: 23670 - protein, 60 aa, Artificial Sequence
  Synthetic
VEELRRALDELLEKARKVVEEVEKMIKEVNDRNKKVVDELKRTLDKILKDLEEVAREVDR

SEQ ID NO: 23671 - protein, 59 aa, Artificial Sequence
  Synthetic
SEIEKMKRDSDENIKRMEEIARKWEKESRDNIREIEKRVEDLKRRIEKVIREIEKLRRD

SEQ ID NO: 23672 - protein, 60 aa, Artificial Sequence
  Synthetic
LEEAKRKLEEVLDKNRRVVEKVERRIDRINDRNREVLERAEKELDDILRKLEEVVRRAEK

SEQ ID NO: 23673 - protein, 61 aa, Artificial Sequence
  Synthetic
DEIREAKKRLDDIVTELRDHIRRSKERHERLVKELERHIRELEKKVRELIKRLDDAVRRDG

SEQ ID NO: 23674 - protein, 59 aa, Artificial Sequence
  Synthetic
EEVKREITRLLEDLKRVSREHREEIRKLLETTREVSKRHREKVEDLLRKLEEVLERVRT

SEQ ID NO: 23675 - protein, 56 aa, Artificial Sequence
  Synthetic
SELEEIARLAEEIERKLRESLRESDKMHKKLNKENEDLLEKIRKEVEDIIKKLRDL

SEQ ID NO: 23676 - protein, 59 aa, Artificial Sequence
  Synthetic
ERVEEAVRRVVEKIKDVVEKHSDASRRLNEELKESVDRLRREVEKLVEKIRKVVEDLRK

SEQ ID NO: 23677 - protein, 60 aa, Artificial Sequence
  Synthetic
SDLERVEKESRDHIDTLRRIVERVEEHVRRSIKTLDELVDRARRSVERLIEELEEMKRKD

SEQ ID NO: 23678 - protein, 59 aa, Artificial Sequence
  Synthetic
RRVEEELRRLLEENRRVVEEVEKELDRLLKESEDAVRRVEEALDRLLKELERVAKEVKD

SEQ ID NO: 23679 - protein, 60 aa, Artificial Sequence
  Synthetic
SDLEKVKKDSDDHIRELERLVRRAEEHVRDSVRRLREIVEELDRDVRRLIEELKDLKRKI

SEQ ID NO: 23680 - protein, 59 aa, Artificial Sequence
  Synthetic
EDVKKKLDDLLRENREAVKRVERALDKLLTDDRRVVEEVERALDELLKRIEKVAREVEK

SEQ ID NO: 23681 - protein, 60 aa, Artificial Sequence
  Synthetic
RDVDELRKESEDHIRELRKLVEDVRRHVKRTNDDLERLVKEVDDTLKELIKEVKELKRRV

SEQ ID NO: 23682 - protein, 59 aa, Artificial Sequence
  Synthetic
EDVKKKIKDLLDTNREVVERVLRTLRDLLRRNKEVIDRILETLDELLERVKREIEKDAK

SEQ ID NO: 23683 - protein, 60 aa, Artificial Sequence
  Synthetic
DDAERAKEESERHIKRLKDLVEELRKHSERTDEEIKELLRRLEKTVRDLIRELERLKEEI

SEQ ID NO: 23684 - protein, 59 aa, Artificial Sequence
  Synthetic
EDVKRKLDKLLKENEDVVREVDRALKELLRKNAEMLERAKERLDRLLEEVKKVADEVRR

SEQ ID NO: 23685 - protein, 60 aa, Artificial Sequence
  Synthetic
SIEEELERLLRKNEDSLRRVRDEIRRLEEEIRRVLKKWRDEARKLLREIERVLKEVAERK

SEQ ID NO: 23686 - protein, 59 aa, Artificial Sequence
  Synthetic
ETLLRDLERKSKEVDERLEELLRRAKERVEELIREIEALLDRNRRNVERLIRELERRTD

SEQ ID NO: 23687 - protein, 61 aa, Artificial Sequence
  Synthetic
EELERLLEDVKRTLKELRDRAKEVLDRVRKTLEELKRELKRVLDEVTELLERLRRIVKREG

SEQ ID NO: 23688 - protein, 56 aa, Artificial Sequence
  Synthetic
KRIIKEARERVETVNRETKKILEEIARTVEKVDEESRRILEKVKRDAERVLREIKK

SEQ ID NO: 23689 - protein, 60 aa, Artificial Sequence
  Synthetic
DELEEVEKEVKRILEESRRLLEELEREVRELLERSKRILEELEEEVRRLLEKLKRVRTRG

SEQ ID NO: 23690 - protein, 55 aa, Artificial Sequence
  Synthetic
EELERLKRELDKVHEEVREKVERAKRELERVHKRSEEEARRLKEEVDKVLDELRK

SEQ ID NO: 23691 - protein, 59 aa, Artificial Sequence
  Synthetic
SELDELRKRVEEIVEENDRVLRELEKRVRELSERNKKTLKELTKRVREILERLKELKDR

SEQ ID NO: 23692 - protein, 59 aa, Artificial Sequence
  Synthetic
EEVKEVVRRLEEKVKESLDRAEKVLRRLEREARESNRRHEEEVRRLKEEIDRVVTELRR

SEQ ID NO: 23693 - protein, 58 aa, Artificial Sequence
  Synthetic
SLEDVLREVEERIRKSLEEHRKVTDEAEKELRRIVEDHKRVLEEVKKEIEDVIKELKK

SEQ ID NO: 23694 - protein, 60 aa, Artificial Sequence
  Synthetic
KEKVAREIRETVKKLHEDNRRMSEEIKKTVERLLDKLRRSLERIRREAKDLVRKIEDLRR

SEQ ID NO: 23695 - protein, 58 aa, Artificial Sequence
  Synthetic
KLEEVLRKVAEDIKRSLEDLKRVLKEVADHIRRSLEELRRVLERVKKEIEDVLRELEN

SEQ ID NO: 23696 - protein, 60 aa, Artificial Sequence
  Synthetic
ADKVAEDIRRDVRRLDEENRELAERIKRAIEELDRKNKDLARRIEDAVRRLLEKIKEAVR

SEQ ID NO: 23697 - protein, 58 aa, Artificial Sequence
  Synthetic
DLEEVLKEVEKRIRDSLKDLKRVLDEVLDHIRRSLKENRDSLRKLEEDLRRVLEELRR

SEQ ID NO: 23698 - protein, 60 aa, Artificial Sequence
  Synthetic
EKKVAEKIRKEVKELDEKNKELARRIRDVAKKLDERNKDVSRRLAEEVERLLRKIKEKVR

SEQ ID NO: 23699 - protein, 58 aa, Artificial Sequence
  Synthetic
DLERVLEKVARDIEESLRRNKESLKRLKEHVEESLKENRKSLEDLRKKLKDVLDELKK

SEQ ID NO: 23700 - protein, 60 aa, Artificial Sequence
  Synthetic
KKKVADKIREEAKRLDKENREASDRARDVVRRLDEKNKKLSEEMKRTVERLLETLDRKMR

SEQ ID NO: 23701 - protein, 58 aa, Artificial Sequence
  Synthetic
DLERFLEEVARKIEKSLEELRRVLEEVRDRIRRSLEENTKSLERLTEEVRRVLERLKD

SEQ ID NO: 23702 - protein, 60 aa, Artificial Sequence
  Synthetic
EDKVAKEIEDEVRRLDEKNRKLAKEIRDEIRKLDKENKDLSKELRDRVEELLRKIEETVR

SEQ ID NO: 23703 - protein, 59 aa, Artificial Sequence
  Synthetic
KAAEEIRKKVEDYKRESEKILEEVEDHSRRSKETLKRLLDDLRRAVEELKRRLEELKRR

SEQ ID NO: 23704 - protein, 56 aa, Artificial Sequence
  Synthetic
REVADELKKRLKRANEESERVLRELAERNKTALEEAERVLRRLKEEIEKVLRKLKK

SEQ ID NO: 23705 - protein, 59 aa, Artificial Sequence
  Synthetic
SEVEDLRRRVEEIKRRVEEILRENKEVSEKSIRELERLLEELKRLVDELLKRLEELKRE

SEQ ID NO: 23706 - protein, 59 aa, Artificial Sequence
  Synthetic
DDLRRALKDVVDEVKKVVDELREENDRLRKENKRAVDEVRKELERLLRDVERVIRRAEK

SEQ ID NO: 23707 - protein, 59 aa, Artificial Sequence
  Synthetic
EELDRLRRHADESRKRAEEILKRNEEEIRRLVEELKRILKTNEDVLRDLEKKLEDLKRR

SEQ ID NO: 23708 - protein, 59 aa, Artificial Sequence
  Synthetic
DKLRTTIDEVRRRSKKVLDDLRDRNRRLLEEVDRAIKEVRETNEELLRRLKRVIDEVRR

SEQ ID NO: 23709 - protein, 59 aa, Artificial Sequence
  Synthetic
SAEELLRTIEKRIEDNHRRLEEILEEIARLIEDMLRTDERIVREIKELLKEVLDRVRRA

SEQ ID NO: 23710 - protein, 59 aa, Artificial Sequence
  Synthetic
EEVVKKLVEDVERELERSLREAEDLLRRVEEVIRTSKKESKDVLEKIERLLRDLERRTR

SEQ ID NO: 23711 - protein, 59 aa, Artificial Sequence
  Synthetic
SVAEELKKEVDDLLRDLKKKLDDVRRDHERLLRELEEHLERSRERVERLLRTLEDVARK

SEQ ID NO: 23712 - protein, 56 aa, Artificial Sequence
  Synthetic
RKVIEKIERDIRKILKEVEEVLRTLKKKSDEILERAKRVTEKIERDVTEILERIKK

SEQ ID NO: 23713 - protein, 59 aa, Artificial Sequence
  Synthetic
SVADELRKTAEELLKRLREHLDTSRRRVEDLLRRNEKKLRDVLREVKKLLDELRELKER

SEQ ID NO: 23714 - protein, 56 aa, Artificial Sequence
  Synthetic
EDVIREIKDRVRRILDEARRVSEKLRRDVEKINRESREVLERIKELIKRILKEAKD

SEQ ID NO: 23715 - protein, 57 aa, Artificial Sequence
  Synthetic
SELEELLREVDDSLKKLETEAKKLLDEVRDSLRKLEETLRRVLREVEEELKELEKEN

SEQ ID NO: 23716 - protein, 59 aa, Artificial Sequence
  Synthetic
KRVEDVLREIRRRAREINERLKKILKEAKEVAEKVNEETRRVLKEIKELIERVLRELRK

SEQ ID NO: 23717 - protein, 60 aa, Artificial Sequence
  Synthetic
REAEEAKEEVEELNRRNKKELDDARRRVDELDKRNKDRLKESSDRVKRLVEELERVKEEG

SEQ ID NO: 23718 - protein, 56 aa, Artificial Sequence
  Synthetic
KDVLKRLAELIKESIRELERVLEELAEKIDRSLKELDDVLRKNETDLKRVIEDLKR

SEQ ID NO: 23719 - protein, 60 aa, Artificial Sequence
  Synthetic
DEAEKAKRDSEKVVEDNRKMLEDSTRRAERLNEENKKELKKSTEEAEKILREIDETKRRG

SEQ ID NO: 23720 - protein, 56 aa, Artificial Sequence
  Synthetic
DEVLKRLKEEHRRLIEELEEVLRRNEEIIRRSIEDLERVLDRNRRELEDVIRRLKE

SEQ ID NO: 23721 - protein, 60 aa, Artificial Sequence
  Synthetic
REAEEVERKVEELNRRNRKVLDDARKESEEVVRRNREFLRRLEERVRTILRELDKRKRDG

SEQ ID NO: 23722 - protein, 56 aa, Artificial Sequence
  Synthetic
DEVLRRLAEDIERSIRELEKVLRELERIHRELIKELKEVLKRLEKDAKEVIERLRT

SEQ ID NO: 23723 - protein, 61 aa, Artificial Sequence
  Synthetic
SLAEEIDKTIRELAKRHEKTVEDIKKIITELEKKHRDTAEELERIVREIEKKIRELKKRLK

SEQ ID NO: 23724 - protein, 59 aa, Artificial Sequence
  Synthetic
EELERVLREAEETLRRLIEKDEKVNREADEKSERLIREDEKVLEDVAREVERLLRELDK

SEQ ID NO: 23725 - protein, 61 aa, Artificial Sequence
  Synthetic
DEDREARELVERLREEHRRTAEEIKKIIEDLERKHRETMERLKRIIEKIERDIRRLKRDLK

SEQ ID NO: 23726 - protein, 59 aa, Artificial Sequence
  Synthetic
KELERVLEKVARDLKKLVDDDRRVNETANRRSRKLIEDDKRVLEEAAKEVKRLLDELDK

SEQ ID NO: 23727 - protein, 56 aa, Artificial Sequence
  Synthetic
DTERTVKEKIRKWKEDVERVERRLEELVDRARKLSKENVDRMRELVRRLEDRVRKD

SEQ ID NO: 23728 - protein, 56 aa, Artificial Sequence
  Synthetic
REVLEDARRKIDELNERVERVAETVRRKLDKILEDNKRVVERVKEEIRRVLEELER

SEQ ID NO: 23729 - protein, 59 aa, Artificial Sequence
  Synthetic
SEEEVLREAAKTVEKLLDEIRRSLEKVSKRVEDSNRELKESLDRVRERVRELLEELRKN

SEQ ID NO: 23730 - protein, 56 aa, Artificial Sequence
  Synthetic
KDDVERTLREIAKLVDEVDKENKRALRENEERVKTLNRENEEMLKRIEEEVRRATK

SEQ ID NO: 23731 - protein, 59 aa, Artificial Sequence
  Synthetic
DLEEVAKEVKKALDELLKRNEDSARRVKEAIRELLKRINDVTREVEETLDRLLKEVEDG

SEQ ID NO: 23732 - protein, 60 aa, Artificial Sequence
  Synthetic
AERVVKRLEELLREAAEHSKRSNDELERLLDRLRREVERYERELEKRKKEAKELADKLRK

SEQ ID NO: 23733 - protein, 59 aa, Artificial Sequence
  Synthetic
DLERRLDELLKRIEDRVRELVRTLEESLRELERRVREIIRRLEEHLRRIEKMVRDLKRA

SEQ ID NO: 23734 - protein, 56 aa, Artificial Sequence
  Synthetic
ERVIKKAEEDVRRLLREIEEVSERHKREVDRLEREIEEVSREHKERVEKLLREIER

SEQ ID NO: 23735 - protein, 59 aa, Artificial Sequence
  Synthetic
KLEEDLKRILDELRRMAKEIIDRLEDHLRKIKKDVDKLSKENKDHLKEIEDTVRELKRN

SEQ ID NO: 23736 - protein, 56 aa, Artificial Sequence
  Synthetic
ERVIKRVDEEVKKLAEEIRKVSEEHEKRVKKLLKEIEKSSEDHRRRVEELLREIDR

SEQ ID NO: 23737 - protein, 59 aa, Artificial Sequence
  Synthetic
SEEEEVEEELERHHRDVEEYVKRLKELLDKLRRKNETTVRDIARLAKKHHDDVDELKKR

SEQ ID NO: 23738 - protein, 55 aa, Artificial Sequence
  Synthetic
REVLKRFKDKVKENRDESERVHREIKERLEELKRKNEDVLRKVKKILDDNEERLR

SEQ ID NO: 23739 - protein, 57 aa, Artificial Sequence
  Synthetic
KDLEKLVEDIRRLLEELKKTVEDNKREIKELLDRLREKVKENLKRHKELNKRLRDTG

SEQ ID NO: 23740 - protein, 59 aa, Artificial Sequence
  Synthetic
KEVKDRIEEVLRELREAVRRHHEKVKEVLRELKEALDKHHKDVTDSLRDVERLVEEARR

SEQ ID NO: 23741 - protein, 58 aa, Artificial Sequence
  Synthetic
SEKEILDEIRDRIRKLLEEIKDYLEKSKKKIRDLLEKIKKVLEDNKERVDRLLDVIRK

SEQ ID NO: 23742 - protein, 55 aa, Artificial Sequence
  Synthetic
DDVRREAKRLLEEVAEAVRRIHETSKRLLERVDEEMKRVEETIRKTNKEVEDAKR

SEQ ID NO: 23743 - protein, 57 aa, Artificial Sequence
  Synthetic
SDVEKLIRDAEKKMDDFRKDSERLVRELEEKLKRHEERVRDLLRELKELLEEVRRKD

SEQ ID NO: 23744 - protein, 55 aa, Artificial Sequence
  Synthetic
EKIKEAVDRIKKALRDSHKELAEVVERIKRKLDETNRELKDEARKIKEELRRVEK

SEQ ID NO: 23745 - protein, 60 aa, Artificial Sequence
  Synthetic
SEVETVKKRLEDSTKESEDTVRKVKRELERLIERSEDTLRRIKKRLDDLIRTIEDLKRRG

SEQ ID NO: 23746 - protein, 59 aa, Artificial Sequence
  Synthetic
KELLDTLRRLLEENKRRHKETVDEIERLIKEVERANREILTRIKKALDDVRRAVEEIKR

SEQ ID NO: 23747 - protein, 60 aa, Artificial Sequence
  Synthetic
REVEEVLRKVREDSKRNKDELKRLLDEARKESEDNKRDLEKLLKEVREEVRRVEEILRKT

SEQ ID NO: 23748 - protein, 55 aa, Artificial Sequence
  Synthetic
EDVLREIETLLDKNHKDNKKVLDDIRELLKENADRNRRVLEEIKKLVEDVERKVK

SEQ ID NO: 23749 - protein, 58 aa, Artificial Sequence
  Synthetic
DEDEKALREIKKLIEDNERLNREVNERIERLIDRARRLMERVNREIERLIKEVRERLG

SEQ ID NO: 23750 - protein, 58 aa, Artificial Sequence
  Synthetic
EELEKTLRDIRKRSKEDADKVKKSLEEVEEEIRRIEKRLRESLKKVEDDIERIRREAT

SEQ ID NO: 23751 - protein, 56 aa, Artificial Sequence
  Synthetic
SEIEKLTKEIRDLIRTSREEIKKLMEELERNVREAEESIKRLLEKAEELIRRIAEE

SEQ ID NO: 23752 - protein, 56 aa, Artificial Sequence
  Synthetic
KEDVKRELERIKKSSDDVRKKVEDESRKHREEVERLERELDRKLEDIRRKVEETKT

SEQ ID NO: 23753 - protein, 61 aa, Artificial Sequence
  Synthetic
SEIEKLAEDVERIAKKIEDVVRELRKANEDIIKEVRDINKELRDKVEEILRRIEKIVRDRL

SEQ ID NO: 23754 - protein, 59 aa, Artificial Sequence
  Synthetic
KEILDRIRKKLRETLERVRDRLRKYLEDLERRLEELRREHRKTLEELKEKLKRLADRVK

SEQ ID NO: 23755 - protein, 57 aa, Artificial Sequence
  Synthetic
SEVEDLERRAREVNKRIKDLIDRLRERVRKIEEDIRRLNKELKEEVDKIIEEIRKDG

SEQ ID NO: 23756 - protein, 58 aa, Artificial Sequence
  Synthetic
KLIEELLREHEKMLKEIEDRIRKIERELDELLKTLEDKHREILDELEKELRKAKERRR

SEQ ID NO: 23757 - protein, 60 aa, Artificial Sequence
  Synthetic
SDIERILEENEKTNRENRKRIEDIRRELEERLDRNRRRIEEILRRAEKMLEEIEDIFRRS

SEQ ID NO: 23758 - protein, 59 aa, Artificial Sequence
  Synthetic
EDKLRDLKKKLRDSLRTLEELHRKLKKDLDEILRRLEELHRKLKEDLDRILKAVRDTAK

SEQ ID NO: 23759 - protein, 60 aa, Artificial Sequence
  Synthetic
SEIEDIKRRNEENNRRNKKRIDDILEELKRRVEENRRRLEDIERKLREDKERLKDIFRRS

SEQ ID NO: 23760 - protein, 59 aa, Artificial Sequence
  Synthetic
EDKLRKLEEDLRRSLETLREIHRKLKEELDRILEELKRLHERLKRRLDEIADEVARTAR

SEQ ID NO: 23761 - protein, 60 aa, Artificial Sequence
  Synthetic
SDIEEIERRNRENNERNKRRIEEIEKRNREENKENEKDIERILRRAEELLKRAKEILRES

SEQ ID NO: 23762 - protein, 59 aa, Artificial Sequence
  Synthetic
EKKLRELKKKLDDSLRTLEELHRELMKRLDESLKTLKELHDELKERLDRILKEIRDDAK

SEQ ID NO: 23763 - protein, 60 aa, Artificial Sequence
  Synthetic
SELEKTLEDLKRHSEENKKKLEEDLRDMERNLKENKDRLKKILEEAEKTLKDLERRFREG

SEQ ID NO: 23764 - protein, 59 aa, Artificial Sequence
  Synthetic
KDKAEELERRLDELVKENREIHERVKKALDDIVKELEELHERLKRRLEEILRRIAETVR

SEQ ID NO: 23765 - protein, 57 aa, Artificial Sequence
  Synthetic
SSVERFEKAVKESIENIRRLLEELEREIRESMKHLRELVKELKEALDRIVERLRRTV

SEQ ID NO: 23766 - protein, 55 aa, Artificial Sequence
  Synthetic
EEDLKRLDKENKDIEKKIRDLVKEARDENRKLKRDIERTLRELEERLKEVEDRET

SEQ ID NO: 23767 - protein, 57 aa, Artificial Sequence
  Synthetic
SDIEKRLEENERHNERSEERIRELLKELEDHLRRTKREIEKKLEDLKRLLDRLREED

SEQ ID NO: 23768 - protein, 58 aa, Artificial Sequence
  Synthetic
EELKRVKDELDKSLKHSRELIERAKERLEEIKKRSKELVDRAEKRLDEILKEVKDDFD

SEQ ID NO: 23769 - protein, 57 aa, Artificial Sequence
  Synthetic
DEIKEREDDVKRHLDRTREEIEKLLKEMEEHTERSRRKIKKVAEDAEERLRKVEEEN

SEQ ID NO: 23770 - protein, 58 aa, Artificial Sequence
  Synthetic
KELEEVKRKLDRILEESEKLVREAEKRLDELLKDNKRLVEELEKELDRILEELRKRVD

SEQ ID NO: 23771 - protein, 57 aa, Artificial Sequence
  Synthetic
DSIEDLERRAKESDDHLEKLIRELRDELRRSLETVRRNIEDLRRTLEEVLRRLEEDG

SEQ ID NO: 23772 - protein, 59 aa, Artificial Sequence
  Synthetic
EEMLREIKKELEETNKRAEDDVRKIREELREHNERHKERSKRIKEELKRTLDELKKKRK

SEQ ID NO: 23773 - protein, 60 aa, Artificial Sequence
  Synthetic
SRIETLVRRMKELLKEVEDKSEKSKRRWEDRLKKVAEDSKRRVEEMDRELDEVRRKRERG

SEQ ID NO: 23774 - protein, 59 aa, Artificial Sequence
  Synthetic
ERLLRELKRIVDEVKKELDRLDTEHNKAIEDVKRELRKLDEEVRRIVERVKRELDRLEK

SEQ ID NO: 23775 - protein, 60 aa, Artificial Sequence
  Synthetic
SEIEDLIRRIRETLKRVEEDSRRSKEEAKRKLDKVKEDSERLVEKMRRDLEKVKRETDKG

SEQ ID NO: 23776 - protein, 59 aa, Artificial Sequence
  Synthetic
EELLKRLKEVVEDVIRKLDRLDKEHTEIVEEVERRLDKLDKDVERIVEEVKKALDETEK

SEQ ID NO: 23777 - protein, 60 aa, Artificial Sequence
  Synthetic
SEIEKLIEDIRRRLKKLEDESRKSVKDARDMLRRVEERSRDSVRKMREELERVEDESRRG

SEQ ID NO: 23778 - protein, 59 aa, Artificial Sequence
  Synthetic
DELLKRLEDVVRDVKRKLDELDERHTRIVEDVKRRLDDLDREHRKIVEEVKKELDKLLK

SEQ ID NO: 23779 - protein, 60 aa, Artificial Sequence
  Synthetic
SEIEKLIEELRRELEKVKDELERSIEEMDRELDDVRRDSKRLVDEIKRELREVTERTKRG

SEQ ID NO: 23780 - protein, 59 aa, Artificial Sequence
  Synthetic
EELLKRLEEVAEDVKRALEELLKKHTRVVERVEKALDELDKELERIVREAEKELDRREK

SEQ ID NO: 23781 - protein, 60 aa, Artificial Sequence
  Synthetic
SEVEEEEKTAEKILEEVAEEIKESIKRIREEVKKNEDDSERSVREMERRLREVEERIRRG

SEQ ID NO: 23782 - protein, 59 aa, Artificial Sequence
  Synthetic
EELLRRLKRVVERVKERLDRLLEEHTRVVEEAKERHRELDERHEKIVRDVVRELDRRVK

SEQ ID NO: 23783 - protein, 60 aa, Artificial Sequence
  Synthetic
SEVEKVVKELEDELRRVAEDSERSIREMEKRLDDFRKRVRETAEKMKEDLRRVEERARRG

SEQ ID NO: 23784 - protein, 59 aa, Artificial Sequence
  Synthetic
ERILKRVEDIVRRVEEELDKLDEKHTRVVKKVSDALDRIVEELEKIVREVAKRLEDLRK

SEQ ID NO: 23785 - protein, 60 aa, Artificial Sequence
  Synthetic
SEVEKKIEEMRRTLDEARRRSEESKREIKKELDEARKRVEESLKRLRETLKKVEDERRRG

SEQ ID NO: 23786 - protein, 59 aa, Artificial Sequence
  Synthetic
ERLLRRVAKVVEDVKRELDRLDEDHTRAVEEVERALDDLLKKHEDVVREVKTELEKLLK

SEQ ID NO: 23787 - protein, 57 aa, Artificial Sequence
  Synthetic
SELEELIRDIERKLEKVKRDSERSMREIEEDLKRVRKKTEESERRIRDLLDKVRKRK

SEQ ID NO: 23788 - protein, 56 aa, Artificial Sequence
  Synthetic
TEDLRRVAKRVEEELDRSNEEHSKIVDKAKRDLDKSNKEHSKVVEDAERTLDRVED

SEQ ID NO: 23789 - protein, 57 aa, Artificial Sequence
  Synthetic
SELEELEERIERLLEKVRRESEKLLRELEKKLKDVERKIEDSIRKIRDDLRKVRERK

SEQ ID NO: 23790 - protein, 56 aa, Artificial Sequence
  Synthetic
TEDLRRVLDRVKKDLDRSNEEVRREADRIMKELDKLLKKHSDVVKEVLEALDDTDR

SEQ ID NO: 23791 - protein, 60 aa, Artificial Sequence
  Synthetic
SEIEEIKRRLEETNKRVREKNKRSVDRIKEHLERSRRRVEEIIRRIEKLLEELEEKARRT

SEQ ID NO: 23792 - protein, 59 aa, Artificial Sequence
  Synthetic
EKLLRDLEKALRDSIRTLKRSVEENDRINKEANEDSERLLRELKKVLEKAKKDVDELRR

SEQ ID NO: 23793 - protein, 60 aa, Artificial Sequence
  Synthetic
SLEEELRELARRLKEEVRKLEETLEKVLEDSARNIKRLIDDLKRVNDELRKRVDDLIREV

SEQ ID NO: 23794 - protein, 59 aa, Artificial Sequence
  Synthetic
KEALDRVRKKLEDALKKLRDEVREMKKKNDKTNKEVKDKADELRKKHEDTLEELKKRVK

SEQ ID NO: 23795 - protein, 57 aa, Artificial Sequence
  Synthetic
SEVDEIIKRIEDLLKEVRDESKRNEDRIREKLKRLKKKSEDNAEKIKDELKKIRDRK

SEQ ID NO: 23796 - protein, 59 aa, Artificial Sequence
  Synthetic
KEVLDTLRDAIRRVKEELDRNLEKNTELIKRVKETLDDLLRRNKELIRKAEETLDEERR

SEQ ID NO: 23797 - protein, 61 aa, Artificial Sequence
  Synthetic
DELEKIRKELEDLSRENKEKLERIARELKRLSEENTETLEKLKEEIRRLLEKLKRIVEKDG

SEQ ID NO: 23798 - protein, 59 aa, Artificial Sequence
  Synthetic
KEMLDRIKELLDTHRRILEDIKREIDKLLEDHRRRLEELLRDLKRALDRVREEVDRLRR

SEQ ID NO: 23799 - protein, 57 aa, Artificial Sequence
  Synthetic
DDVRRIEEEIRRTLRELRETLKRVERRNREENEDLKDKMRRMKKENEDTNERVKKEG

SEQ ID NO: 23800 - protein, 56 aa, Artificial Sequence
  Synthetic
KERLDKLLEDLAKEARKVIEDLKEILRRTKESIDEVEKTLREILKKSKETADRVET

SEQ ID NO: 23801 - protein, 57 aa, Artificial Sequence
  Synthetic
SDLERLKKRNDDANRKLKETLDRVEKENRDVNRKLEKELKEVEEKNRRENKKVRDRG

SEQ ID NO: 23802 - protein, 56 aa, Artificial Sequence
  Synthetic
KEELDKILTRSEEVARRIIEELKKILEETRKSAERVIRRLEEILKESEREVREVET

SEQ ID NO: 23803 - protein, 57 aa, Artificial Sequence
  Synthetic
SEVEETIKRVRDTLKKHNEESEKAIRELEEELKRLDDKNREAVEDVKRTLDELRRTK

SEQ ID NO: 23804 - protein, 59 aa, Artificial Sequence
  Synthetic
KDLRKRLEELLREVEEDLKRNIEKLDKALKEAKEVIERSIEHLRRVLEEVERVLRELAR

SEQ ID NO: 23805 - protein, 60 aa, Artificial Sequence
  Synthetic
RKEDEMRKLLDEIEKDLKRNDERVRRVLKRSKENLRRLEERAEKLLETVEREIKRLEEEG

SEQ ID NO: 23806 - protein, 59 aa, Artificial Sequence
  Synthetic
EREVKRTIDELKDELRKHNDKTEKLIRRARETDKELNDRVAKREEEARRELEEVDRRVR

SEQ ID NO: 23807 - protein, 60 aa, Artificial Sequence
  Synthetic
SLEEAVEKLLRDSEENLKKNEEDVRRLLKKSKENADRLRDEVRKLLETAEREIKRLEDEG

SEQ ID NO: 23808 - protein, 59 aa, Artificial Sequence
  Synthetic
ERLIRETEKDVKRRDEEHNTRTEREIREAKKEDEKLNKEVRDTEKRLRDELRRVEERVR

SEQ ID NO: 23809 - protein, 60 aa, Artificial Sequence
  Synthetic
SKEDKVRELLRRSKENLDRVREEVRKLLKKSRDTLEELRERAKRLLEEVEEVIKRLEEEG

SEQ ID NO: 23810 - protein, 59 aa, Artificial Sequence
  Synthetic
EKEIEETIRRVEDMDRRLNERLRKKIEDAERMDEALRERVERLIRRVRKELEDVERRVR

SEQ ID NO: 23811 - protein, 56 aa, Artificial Sequence
  Synthetic
SELEEVARRIEKMIRDLEKDLRELERKVRESDERLKRDLERNEKEHRDTIEAMRRR

SEQ ID NO: 23812 - protein, 59 aa, Artificial Sequence
  Synthetic
KDVRDALKKLLDELKKAVEDVRREIERLIREHKRVTEEVERADKELNDRTRKAADELRR

SEQ ID NO: 23813 - protein, 57 aa, Artificial Sequence
  Synthetic
EEVERLEEEVRRRKKEWEDRLEEVKRRNEKAKRESERENEKIAREVREVVKELRERG

SEQ ID NO: 23814 - protein, 56 aa, Artificial Sequence
  Synthetic
KRRLEELLRDHSRMIRRVEAELDKSLEDHKRALDENEKRIDEWLERLRKIVEEVEK

SEQ ID NO: 23815 - protein, 56 aa, Artificial Sequence
  Synthetic
SKIEEIERRVRELEETWRRKLEEVEKDSRRSVKKMEEDLERAARETEEIKRRLREE

SEQ ID NO: 23816 - protein, 56 aa, Artificial Sequence
  Synthetic
ERKLEELLRKHNEVIKRVKEELKRLDKEHTDIVEEVKKELDKLDEDLKRVADEKRK

SEQ ID NO: 23817 - protein, 57 aa, Artificial Sequence
  Synthetic
DEDEDLERLLRKLKRVLDEIRKRIRENIEENREVVERAAREVKKSIDENRKVVDDVQ

SEQ ID NO: 23818 - protein, 56 aa, Artificial Sequence
  Synthetic
GEEVRKKIEDLERELRRTLEEIHKENEKSKRKIEKALRDIREENKKHIREIEETKR

SEQ ID NO: 23819 - protein, 60 aa, Artificial Sequence
  Synthetic
SDIETLTRDVERSIKELEDHLKKHHEEVKERIRRLEEHADELRRRAEKLKEELKRMKDRG

SEQ ID NO: 23820 - protein, 58 aa, Artificial Sequence
  Synthetic
KVEEDVKRLVKKLDEVNERHRREIERNRKELEDVSRRHKEKVDRILEDIKEALDRVRK

SEQ ID NO: 23821 - protein, 57 aa, Artificial Sequence
  Synthetic
SESETVKKENEDHIRKLEDDLRKLEEDNKRHVDDIERRLRDLKRENERFAEEVKKRG

SEQ ID NO: 23822 - protein, 59 aa, Artificial Sequence
  Synthetic
EEVKKTLETLVRTNRRAIREVERRLKESLDHNREVLKRAEEDLRRSIRHLREVVREADR

SEQ ID NO: 23823 - protein, 60 aa, Artificial Sequence
  Synthetic
SIEDELRELKERLERVVEELRRLHEKTIEDLKRVVEKSEKTLRDIRRELERVVEEVRRRR

SEQ ID NO: 23824 - protein, 59 aa, Artificial Sequence
  Synthetic
KEVLDRLRKKVEDTIRKMKDEAKKLDDEHKKAVRRLEERNEETARRVRKAVEDIERETK

SEQ ID NO: 23825 - protein, 60 aa, Artificial Sequence
  Synthetic
SIEDILRKLTKDLEDVIRRSRKTSEDLKEELKRVLDKHKEKLDRILEDVERVVREVEERR

SEQ ID NO: 23826 - protein, 59 aa, Artificial Sequence
  Synthetic
KEILDRLEEEVRRLIEELDKENDEARKEHREVAKRNEEEIKKLEEEAKDSIRRLREESR

SEQ ID NO: 23827 - protein, 57 aa, Artificial Sequence
  Synthetic
RESEELDKRLKEIAKDIRDKLDEIRRENEKTAKEIEDTIREIERDNERIDREMERRG

SEQ ID NO: 23828 - protein, 59 aa, Artificial Sequence
  Synthetic
KRFKDVIRRLEEELKKLLKRAEEEIRDSKRHLRELLKKVEKVIRESKANLDRTLKKLRD

SEQ ID NO: 23829 - protein, 60 aa, Artificial Sequence
  Synthetic
SEEEDLRRKVEELEERVERYKEELKKEIERIETENKRHVEELERRLRKIAREVDDAKRRQ

SEQ ID NO: 23830 - protein, 59 aa, Artificial Sequence
  Synthetic
EDLDRLLDEMRREAERLLDELRKVTERIAREVKRSNEENKKVLDEIRKAIKDLLDKLRK

SEQ ID NO: 23831 - protein, 59 aa, Artificial Sequence
  Synthetic
STEEKVEEDLRRLEEKNRRHVREIEERLERMKEENRDHVRKLEEKLRRLDEEVRKVKEG

SEQ ID NO: 23832 - protein, 56 aa, Artificial Sequence
  Synthetic
RETLKRAERKLRESLRHNREVLERARRELKKSLDHNDKALEDAERRIREIREELEK

SEQ ID NO: 23833 - protein, 59 aa, Artificial Sequence
  Synthetic
DLKEVLDKLRELVREVTERIKRTIEEIERLLRKVEREMRETIRTDEELLKTVVDELRRK

SEQ ID NO: 23834 - protein, 59 aa, Artificial Sequence
  Synthetic
RRKIKKVLDDLRKIIEDIERESRESLERLREIIERLKRRSDKTLKDSKKVIDDIRRRTK

SEQ ID NO: 23835 - protein, 59 aa, Artificial Sequence
  Synthetic
DLEEVLEDLRRLMEEVKRRIERTIEEDKRLLDEVERRIRETIRRDRELLKEAERDLREK

SEQ ID NO: 23836 - protein, 59 aa, Artificial Sequence
  Synthetic
RDKIRKVRKELREIIDRIRRESERSLEESRRVIEKIDEKSKRTLEESRRVIEEIKEKAR

SEQ ID NO: 23837 - protein, 56 aa, Artificial Sequence
  Synthetic
SSEEMLRTVEELIKEARKRLDESLEEVRKRIEDAKRRHEESNDENRRLVEDAKRRV

SEQ ID NO: 23838 - protein, 55 aa, Artificial Sequence
  Synthetic
KDVLEELREIIDRLRRESEDSLRRLEKIIKDSEDRSRESSEELKEIIKRLLEEDK

SEQ ID NO: 23839 - protein, 56 aa, Artificial Sequence
  Synthetic
SKDEVLEEVERRIRTAERDLERMVRRNEELIRDAKREHERSNRENERLVTEAKREI

SEQ ID NO: 23840 - protein, 55 aa, Artificial Sequence
  Synthetic
KDVLDELRDIIRRLREELKKSSDDLERIIRRSVKESRDSSEELRKIIEDLKREAT

SEQ ID NO: 23841 - protein, 56 aa, Artificial Sequence
  Synthetic
SEKEVLDEVKELIERAKERLRRMLERNERLVRDAERKLKRLLDEDRESIERVKKRL

SEQ ID NO: 23842 - protein, 55 aa, Artificial Sequence
  Synthetic
ERVLEELKKEIRRLEEEVKKSSEELERIIEKLLEELKRSLEESEDIIRRLEEETR

SEQ ID NO: 23843 - protein, 56 aa, Artificial Sequence
  Synthetic
RKDELLRRVEEEIKKVKKRLKEMLDTDRKLIEDAERKLEEAERRDSDLIRRAKERV

SEQ ID NO: 23844 - protein, 55 aa, Artificial Sequence
  Synthetic
DRVLEELERIIEELKREIEKSLRETEKIIKELEDELRKSLEETERIIRKLEEESK

SEQ ID NO: 23845 - protein, 56 aa, Artificial Sequence
  Synthetic
RSEEVLREVEKAIRRAKEELKRAVETDRRRNTEAARALEEILDTDRRLIEEAKRRL

SEQ ID NO: 23846 - protein, 55 aa, Artificial Sequence
  Synthetic
EKVLRDLKKIIDDLRRRIEESLRDSERIIEKLRRDLEASLEESRRIIERLKEKAD

SEQ ID NO: 23847 - protein, 56 aa, Artificial Sequence
  Synthetic
REKELLDKVKELVERAKRELERLVREDDKLNEDLKRRLTKILKEDSDRIKEVKERL

SEQ ID NO: 23848 - protein, 55 aa, Artificial Sequence
  Synthetic
DKVLEDLRKIIEDLLREIEESLRESREIIKKLEKRAKDSLKETEEIIEELERRDT

SEQ ID NO: 23849 - protein, 60 aa, Artificial Sequence
  Synthetic
SEVEELLDRVKKVADESRREAKRLLDESKRVIDKSLDEVRRLLKESREVIEEVKKRVDEK

SEQ ID NO: 23850 - protein, 56 aa, Artificial Sequence
  Synthetic
DEVLKRLEDLLRKVAEEHRRITREDEELLKRAEEEHERFSKEDEDLLRKAEKEVED

SEQ ID NO: 23851 - protein, 60 aa, Artificial Sequence
  Synthetic
SRVDELVKRVRDVAREVKRINDELLKRVEEVIKESRDRVRELLKKVEDVIRRAAEEIDRI

SEQ ID NO: 23852 - protein, 56 aa, Artificial Sequence
  Synthetic
KEVVREIEKLLEDVRRTSEDTVRKIRELVAEVDDDHRRASETIRRLLKEAEDRARK

SEQ ID NO: 23853 - protein, 60 aa, Artificial Sequence
  Synthetic
SEVEELLKDVERVIKRSEDEVRRLEREVEKSSEDVERINRKLLRDSREVIKKVIEDVRRV

SEQ ID NO: 23854 - protein, 56 aa, Artificial Sequence
  Synthetic
KEVLDRIRELLETARRRHKEATKKIKRILEESEKKSRRSIEEDKRLLDEAKEEVRR

SEQ ID NO: 23855 - protein, 57 aa, Artificial Sequence
  Synthetic
SVEEVVRDNERRLEEDAERTRRVARRIEKLLDELRKKVEDVIREAKERLERLLEEIG

SEQ ID NO: 23856 - protein, 60 aa, Artificial Sequence
  Synthetic
AEDLLREVNKRNEEVIRRNKELLDEVEKRIREVIKRLEELLEKVKRELERVADELRKAKK

SEQ ID NO: 23857 - protein, 57 aa, Artificial Sequence
  Synthetic
DVERVLKENKETLDEDRKRTKEVIDRNKKKLEDLAREVRKVIEEIKKRLKELLDKTG

SEQ ID NO: 23858 - protein, 62 aa, Artificial Sequence
  Synthetic
EEAEELLRRVNKDNEKVVRENEKLLKEVLDDSERVIKELRDLLEEVRRRIEKVIRDLEERRR

SEQ ID NO: 23859 - protein, 59 aa, Artificial Sequence
  Synthetic
STDEFIERLKKILRENEEKVKEVLKRNEDLLKEDEDRTRKAIKELEDKLRRVKERVERQ

SEQ ID NO: 23860 - protein, 56 aa, Artificial Sequence
  Synthetic
VKEIEKELRRVSEESERELRKHDENTKRVSEENKERIDRLRKTLDEVIERAEERAK

SEQ ID NO: 23861 - protein, 60 aa, Artificial Sequence
  Synthetic
SLDEVIRRLEETLRKDEEDTRDVIRKVRRILEENRKEVKRVIDELRRRLEEVKKRVEDSK

SEQ ID NO: 23862 - protein, 56 aa, Artificial Sequence
  Synthetic
ADTIREELRKVLEDNKRILRRLLEELKRVSEESRDRLRRLKEELERVIEEVERRAK

SEQ ID NO: 23863 - protein, 60 aa, Artificial Sequence
  Synthetic
SIARKVLTDLRKIVEDLERDVERSDRDSERVVREVLERNEEVLKRLRDIVEEIKKVIREV

SEQ ID NO: 23864 - protein, 59 aa, Artificial Sequence
  Synthetic
RDDVERIKRDLERILKEVARKATESVKRNERILEEVKRHAEKSTEDVERLLRELEDTVR

SEQ ID NO: 23865 - protein, 60 aa, Artificial Sequence
  Synthetic
DEIEDALREARRVTEEVRREIEKSDKESEDVVREVLRRNEEVLRRLREIVKEILDELRKR

SEQ ID NO: 23866 - protein, 59 aa, Artificial Sequence
  Synthetic
EKRVREVLRDLERLHEESKRTVERSVERNKTILKEVRKHAETSKRELERILEDVKRATK

SEQ ID NO: 23867 - protein, 60 aa, Artificial Sequence
  Synthetic
SEIDKVKKDLEKITRDVERAIKKSDDDSRKNSKEVLETNERVLEELRRIVKEVLDEIRRV

SEQ ID NO: 23868 - protein, 59 aa, Artificial Sequence
  Synthetic
RDRARDVDKKIKDLHKKSEDEVRKSVKRNRDLLEESKRHAEESREDIRRLLDEVREEAK

SEQ ID NO: 23869 - protein, 60 aa, Artificial Sequence
  Synthetic
SSAETVLTELRKIVRDILEKSKKSNDDLRKIVEEILKDNEDVLRELREILRRIKEKIDER

SEQ ID NO: 23870 - protein, 59 aa, Artificial Sequence
  Synthetic
KEKVDRIRDDIRRLLKKLRDDVERSVRDVRRILKEVKEHAERSEEEVKRLLKELRDRAK

SEQ ID NO: 23871 - protein, 60 aa, Artificial Sequence
  Synthetic
DEMDKVLKDAEDVTRRVKEELRKVDEESRRVVKRILDENRRVLKELEDRVRDLRRLIREI

SEQ ID NO: 23872 - protein, 59 aa, Artificial Sequence
  Synthetic
EEDVRKIKEDLERLHRESKRDVERSARDNERILEEVKRHADESRREVKRLLDEAKEEVD

SEQ ID NO: 23873 - protein, 60 aa, Artificial Sequence
  Synthetic
DDLERVLRELERLVDEIRKEIEKVDRESEELDRRVKETIKELDERSKRLVEEVEDMIRRN

SEQ ID NO: 23874 - protein, 55 aa, Artificial Sequence
  Synthetic
EEVVRRVEKIVRELRKTVEDSIRRNEKSVEETRREAEKSEKRNRELVKRLEEKAK

SEQ ID NO: 23875 - protein, 60 aa, Artificial Sequence
  Synthetic
SEAEKVLKELEDLVRRIEEDIRRTNEEVRKLDEDVLEDIKRVDEESKKLVREIEERIRSR

SEQ ID NO: 23876 - protein, 54 aa, Artificial Sequence
  Synthetic
EFVRRLEELVKRLADKVKESVDTSRTSVKRTEDEARKSVRRNEDLVRRLEEDAK

SEQ ID NO: 23877 - protein, 60 aa, Artificial Sequence
  Synthetic
SELEKVLEELERLVKRIEEEIKRTNKEVRDLDEEIRKAIERSNRETERLAREVLERIREE

SEQ ID NO: 23878 - protein, 55 aa, Artificial Sequence
  Synthetic
EEVVRRLEDLVRRLEESVERSVRTSRKSVKETEDRIREVERHDERLVEELERAAK

SEQ ID NO: 23879 - protein, 60 aa, Artificial Sequence
  Synthetic
SDLEDVLRKVEDLDRKIAEDIRRTNEDVKRLDEEIEEKIRRSNEKLRELVRRVLKAIRDR

SEQ ID NO: 23880 - protein, 55 aa, Artificial Sequence
  Synthetic
EEVVRRLEESVRRTKERIDRSLKTSRDSVRETERKIKESKDTSEKLVKDLRDAAK

SEQ ID NO: 23881 - protein, 61 aa, Artificial Sequence
  Synthetic
SEVDDILRRLREIDEKLLRENEESLKRLKDEVDRLKRKNEKSLDDLRKLVEKLIDDLRKRK

SEQ ID NO: 23882 - protein, 55 aa, Artificial Sequence
  Synthetic
EKVLEEVKRSVDRTRDHLRKSEEDVRRLLDELRRHLEDSERRVRELLRKLREKVR

SEQ ID NO: 23883 - protein, 61 aa, Artificial Sequence
  Synthetic
SKVDEILRELKRLVDELLRRIEKTLKELEDLVRELLKENTRSLEELRELVERLLEELRRRK

SEQ ID NO: 23884 - protein, 55 aa, Artificial Sequence
  Synthetic
REFVERVRELLKRLEDELRKSNRTIEKLLRDLARHLEDSIRRVEELLRELEEKAT

SEQ ID NO: 23885 - protein, 60 aa, Artificial Sequence
  Synthetic
KEVEDILRELEKIAKDLRDEIRESDDESRRLVEELLKRSEDTLKELRDLVKKLLDRLRER

SEQ ID NO: 23886 - protein, 55 aa, Artificial Sequence
  Synthetic
EEVVKRVEELIRRVEEEVRRSTRRNEKLLEDLRRELERSDRELEKLMDDLRRKLK

SEQ ID NO: 23887 - protein, 60 aa, Artificial Sequence
  Synthetic
DDVEKILEDLKRIDTELTKRTRDSNKELEDEVRRLMERSRRTLKELEDEVRKLLDRLRKR

SEQ ID NO: 23888 - protein, 55 aa, Artificial Sequence
  Synthetic
RKVLEDVRRSLERTERELRESDKSVKKLLDELKEELDRSDREVERLLEELRDAVR

SEQ ID NO: 23889 - protein, 60 aa, Artificial Sequence
  Synthetic
SEVDEILRKLRELVKELIRRTEESNEKLRKLVEDLRDESRKSLEELRELVERLADELRKR

SEQ ID NO: 23890 - protein, 55 aa, Artificial Sequence
  Synthetic
ERVVREVEELLKELKRRLEESDKSVAELLRRLEKDLRESDRRVEELLKRLEDEVK

SEQ ID NO: 23891 - protein, 60 aa, Artificial Sequence
  Synthetic
SEAEKILTELEEIDRRLVKRTEDSNRKLRDTVRKLEEESKKSLEELRELVDRLLKRLDER

SEQ ID NO: 23892 - protein, 55 aa, Artificial Sequence
  Synthetic
REILERVRESLERTDKRLRESDESVKKLLEDLKRKLEESDRRAERLLEELRKRAT

SEQ ID NO: 23893 - protein, 58 aa, Artificial Sequence
  Synthetic
SELEEVLKRVEETVRRLTKRLEESLEETRRIVDKLREDLRRSLERTERIVRELTEKLG

SEQ ID NO: 23894 - protein, 59 aa, Artificial Sequence
  Synthetic
EEELREVEKKAEKLVRELEERLKRVIEDSERLVTDLKEKLERVLETSKKLLADLEERAR

SEQ ID NO: 23895 - protein, 57 aa, Artificial Sequence
  Synthetic
KELDEVLEKVKRIVDELERKLERSLRETKRIVDELREELKKSLKETEDIVRELERDL

SEQ ID NO: 23896 - protein, 59 aa, Artificial Sequence
  Synthetic
DERLTEVEERAKRLVDTLAEKLKEVERRSEELVKTLEEELRRVLDTSRRLVEELREKAR

SEQ ID NO: 23897 - protein, 58 aa, Artificial Sequence
  Synthetic
SELEEVLKEVEEIVRRLEEELRKSLKETREIVTKLLKKLKESLEDSERIVRELSRKLG

SEQ ID NO: 23898 - protein, 59 aa, Artificial Sequence
  Synthetic
DEEARKVLETAKKLVDDLKRKLERVKEESAKLVDELRKELRRVNERSKELVEKLEREAK

SEQ ID NO: 23899 - protein, 57 aa, Artificial Sequence
  Synthetic
SELEKVLREVEEEVRRLKKKLKESLDRTKEIVDRLKKDLKRSLDETKKIVDELREKL

SEQ ID NO: 23900 - protein, 59 aa, Artificial Sequence
  Synthetic
DKDLKDVERKAEKLVEDLDRELKEVEKTSRKLVKELEAELREVDKTSKKLVDDLRKDAK

SEQ ID NO: 23901 - protein, 61 aa, Artificial Sequence
  Synthetic
REVEELLKEVEESTRTSKKIIEDLLRRVKESSDKSKKDIRRLLEEVRRIVDTVRKILERRG

SEQ ID NO: 23902 - protein, 62 aa, Artificial Sequence
  Synthetic
EELEKRVREVEETLKRLVDENRETLERVARKAKRLVEDDKRDLEEVVRELEELLKRLKEELD

SEQ ID NO: 23903 - protein, 61 aa, Artificial Sequence
  Synthetic
SSVDRLLERVKRTTDESKERVERLLERVKESSERSEREIKRLLEEVERIVREVKKEVERRG

SEQ ID NO: 23904 - protein, 62 aa, Artificial Sequence
  Synthetic
EEVEKRVREVERTVEELVKEDREAVKRVEETIRRLLKKNEDTVKKVEDDLRKLLEDLKRDVK

SEQ ID NO: 23905 - protein, 60 aa, Artificial Sequence
  Synthetic
SEIEELLRRVKKVNDESRERIKELDKRSREVNERSRRKNEELLKRVEEVVREVEERIDRT

SEQ ID NO: 23906 - protein, 62 aa, Artificial Sequence
  Synthetic
KELEDRVRDAVRRLERSLKENEDRVRESIERNKDSVRRNEEHVDESIKRLEKEVDRVRKRAE

SEQ ID NO: 23907 - protein, 60 aa, Artificial Sequence
  Synthetic
SEIEKLLEDVRKVAEEVKRAIDRLNEENKRVNEKSKERIDRLLEEVRKVVEEVLRRVKTS

SEQ ID NO: 23908 - protein, 62 aa, Artificial Sequence
  Synthetic
EEVEKRVRRVVEKLREIVKEVEEKVRRALDENRRSLEENRRRVKRVIEELEKILKEVEDEVR

SEQ ID NO: 23909 - protein, 57 aa, Artificial Sequence
  Synthetic
DEVEEMEKELKKLLDDSKRRSDELIEEMRKLNEESKKRSRELEKRLRDINKEIRDRL

SEQ ID NO: 23910 - protein, 59 aa, Artificial Sequence
  Synthetic
SKLLDDLRKTIEKVIRESRELLEELRKENERVIEESEKLLRDLLRENEKVAEEVRRTAT

SEQ ID NO: 23911 - protein, 57 aa, Artificial Sequence
  Synthetic
SEVEELIRRLEKLLREVEKRARRLIEEAKRLNDESNKESRRLIEELERLVEDVAREA

SEQ ID NO: 23912 - protein, 59 aa, Artificial Sequence
  Synthetic
EKLLRDLERAIRDVVRKLEELLRRLREENERVIKESEELLERVRKEIEDVLREAREAAR

SEQ ID NO: 23913 - protein, 57 aa, Artificial Sequence
  Synthetic
SKVEKLITELEKLLKDSNKKTEDVERELERLNKKSNDDSRRIIEEHKKIVEEIARRV

SEQ ID NO: 23914 - protein, 59 aa, Artificial Sequence
  Synthetic
EELLKRLKDRIKKVVEESEKLLRDLVKENREVIKESEEILRRLAENLKRVKEEVDRRTT

SEQ ID NO: 23915 - protein, 57 aa, Artificial Sequence
  Synthetic
EEVERLIKELDDLLRRSNARTRDLIRKADEELRRSNEESRRIVERMEEINKRIADEV

SEQ ID NO: 23916 - protein, 59 aa, Artificial Sequence
  Synthetic
KKLLDDLKRKIETVIKESEDILRKLEEDLKRVIEESKELLDRLLEENKRVMEEARRRTK

SEQ ID NO: 23917 - protein, 57 aa, Artificial Sequence
  Synthetic
DEVEEIKKEAKRIVEDLKRRNEELKRRLERLVEEVKKRNEESKKRLEDIVRKIKEDI

SEQ ID NO: 23918 - protein, 56 aa, Artificial Sequence
  Synthetic
LKEVRKTLEKARKENEDVIRKIEEDAKEVLRRDEESNRDINRKVDEVRKRVEERRK

SEQ ID NO: 23919 - protein, 57 aa, Artificial Sequence
  Synthetic
REVEEVKKDLERIVEEVKKRNEELKRRLEELLKENKRRNEKSDEDLKRIVDRIDERV

SEQ ID NO: 23920 - protein, 56 aa, Artificial Sequence
  Synthetic
LKDVKRVVEKVRRENEKVLREILTDAEKVSRDDETSNRDLNRKLEEARERVERKAK

SEQ ID NO: 23921 - protein, 57 aa, Artificial Sequence
  Synthetic
SEVEEIKERLKRLVEEVERRNRKVIRESEETVKENEKENRKSKKRLKEILDEIVERI

SEQ ID NO: 23922 - protein, 56 aa, Artificial Sequence
  Synthetic
LKDVKRDVERVLKENKEVLDRLRKEDEEVSRRDKKSNEDINRVVEDVKRKLEEKAK

SEQ ID NO: 23923 - protein, 57 aa, Artificial Sequence
  Synthetic
SEVEKVKEDLKKLVKEVEDRNRESKRRSEETVKENTKKNEDSKRRLKEIVDRIREEV

SEQ ID NO: 23924 - protein, 56 aa, Artificial Sequence
  Synthetic
LKDVRREVKRVLDEDKDTNDKLNDRDRKASEEDERSNRELNKTIARAEEEVKEARR

SEQ ID NO: 23925 - protein, 57 aa, Artificial Sequence
  Synthetic
KEVEDVKEKLKELVERNRDENRKTKEELRRLVEKNRKENEESKKRLKEIVEEIRERV

SEQ ID NO: 23926 - protein, 56 aa, Artificial Sequence
  Synthetic
LREVEKTAEKVSKEDKETNDRIRKDLKKVSDEDKRSNEEVNKRVDKVRKEIEEERK

SEQ ID NO: 23927 - protein, 57 aa, Artificial Sequence
  Synthetic
EESERLDELIKEVVERVKKLNEEARELIKDVLRRNEEVNTRLEELNRKVEKEVREEK

SEQ ID NO: 23928 - protein, 55 aa, Artificial Sequence
  Synthetic
RKVLEKIRRALEKVHEDNRRSIRDVERMLEKVEDDNRKTIERSRRLVKRVEEELR

SEQ ID NO: 23929 - protein, 60 aa, Artificial Sequence
  Synthetic
RSLEELKKEVERVARAVRKVSEDNKRLLDRVREEVKRVSKENRDLVREVERRVEEVKRRV

SEQ ID NO: 23930 - protein, 58 aa, Artificial Sequence
  Synthetic
ERVDRLKEEIEEILRDLERKVRENKERSKKIAEDLRKHAEDNAREVKKALRDLEEKVR

SEQ ID NO: 23931 - protein, 60 aa, Artificial Sequence
  Synthetic
SELERVLREIREVSRETRERSERSLEEIRRVVEDVRRKNKESLDRNREVLEEIRKALEKG

SEQ ID NO: 23932 - protein, 59 aa, Artificial Sequence
  Synthetic
EDRVERVKRELERLVEENERIVRESRKTLEKLVRDVDRTSKRVKDENRKLLRRVEEEAR

SEQ ID NO: 23933 - protein, 60 aa, Artificial Sequence
  Synthetic
SEVEDLLRRIRKVVEEVERRSRDSLRRNEEVVKEVEERSEKSLRDDKKVIDDVKRRLREG

SEQ ID NO: 23934 - protein, 59 aa, Artificial Sequence
  Synthetic
KDEVRKAEEELRKLVRKAEEVVKKSKEDLERTTRKVEKVVRKSEEDSRRLLREVAEEAR

SEQ ID NO: 23935 - protein, 60 aa, Artificial Sequence
  Synthetic
SKLDKILEELRRIVEEVKRRSEESLEEIERVVEEVKRRSRRSNEELKRIVDKIKKDLRDG

SEQ ID NO: 23936 - protein, 59 aa, Artificial Sequence
  Synthetic
EDDVDRVRREADKIVEDVRRVVERSKRRLDELRRDAEKVVRDSERRIDRIVDDVRRTAK

SEQ ID NO: 23937 - protein, 60 aa, Artificial Sequence
  Synthetic
SDLEEVLKKLEDILRKIKETNDKALREIEEVLRRVKERSRRSNKEAEKVLREVEKMLEKG

SEQ ID NO: 23938 - protein, 59 aa, Artificial Sequence
  Synthetic
EDEVRRIKERLERLLRTAERVSREIKKRLEELVDDVRREVKRSKDRLKRLVDEVAERVR

SEQ ID NO: 23939 - protein, 60 aa, Artificial Sequence
  Synthetic
SKVDEILKDIERVVREVEKKSRKSNEELKRISEESKRRNEDALRRLKEIADRVRERLDKG

SEQ ID NO: 23940 - protein, 59 aa, Artificial Sequence
  Synthetic
EDKVRDARRRLKELVDRVKRVVEESEKRIRKLVKENRDVSRRIEEELKRIVREIEEEAK

SEQ ID NO: 23941 - protein, 60 aa, Artificial Sequence
  Synthetic
SKLEEILKKVEKVSEDTKRKSEDSNRRIKKVSDESKELNKKALRDITEMAKEVDRVLKEG

SEQ ID NO: 23942 - protein, 59 aa, Artificial Sequence
  Synthetic
EDRVDEARRRLERLVEDNARVVKRSEDELRKLVEDNRRVSEEIERKLKELLKRVAESVT

SEQ ID NO: 23943 - protein, 60 aa, Artificial Sequence
  Synthetic
SKAEEALKELERVADEARRASEKSNREAKKAADDAKRASEKSLREAERAAREAEKALREG

SEQ ID NO: 23944 - protein, 59 aa, Artificial Sequence
  Synthetic
KDDAKRIKDEADKIVKRAEDAARESKKRLKRLVEDAERAAKESKEELDRLVREAEEKAR

SEQ ID NO: 23945 - protein, 60 aa, Artificial Sequence
  Synthetic
SEVERVLKELEDLIRKLEEEIERSLRELEKLIEELKKEIKESLDELEKLIRDLIRRLDER

SEQ ID NO: 23946 - protein, 56 aa, Artificial Sequence
  Synthetic
SEEADKRAKELLDKLRKVIEKSKEDSRKILKDLERTVKRSEEESRKVLEKLERRVQ

SEQ ID NO: 23947 - protein, 60 aa, Artificial Sequence
  Synthetic
DEVERVLRELRELIKRLEEEIRKSLKELEDLIRRLIEEIEETLKKVEKIIRELKARLEER

SEQ ID NO: 23948 - protein, 54 aa, Artificial Sequence
  Synthetic
ELREEAKKLLRRLEKTVEKSKRDSEKVLRDLEEVVRESERASKELLKDLKRKVD

SEQ ID NO: 23949 - protein, 61 aa, Artificial Sequence
  Synthetic
SELERLLREVEKSSRESVETSRKLNEEVEKTTRESKRRIEELLRRVEKIVDEVKKVIDRDG

SEQ ID NO: 23950 - protein, 62 aa, Artificial Sequence
  Synthetic
DEARERLRRVAEEIKRLAKENKRVAEESKRRAKELLDDNKDTVRRVSERLKELLEDLDRKLK

SEQ ID NO: 23951 - protein, 61 aa, Artificial Sequence
  Synthetic
DEIEDLLRRVRKTTEESKKRSEDLNKEVKDSTREVKKRIKELLEEVERRVKEVKERMERDG

SEQ ID NO: 23952 - protein, 62 aa, Artificial Sequence
  Synthetic
EEAEKRVRRAKEEAERLIRDNERKLKESEEELRRLIKETEDVLRKAEEDIRRILADLRRRLK

SEQ ID NO: 23953 - protein, 61 aa, Artificial Sequence
  Synthetic
SEVEKLLEDVRESTKRVKELSKRLNEEVERTTKESEDRTRRLLEEVKRIVEDVKDKLRKRG

SEQ ID NO: 23954 - protein, 62 aa, Artificial Sequence
  Synthetic
EEAKKRVKEISDEIRKLAEETREVLERSEKRLRELIRRNEKVNKEVAERLEEILRDLDRKLR

SEQ ID NO: 23955 - protein, 56 aa, Artificial Sequence
  Synthetic
REKEDAKRRLEEILREVKKDLDRVHRENEKLVEDTARTVERIKRELKKLLDRAREV

SEQ ID NO: 23956 - protein, 56 aa, Artificial Sequence
  Synthetic
IEELRKRVEDVVRRVKEELERLLKENEDSTREVKKEAERLLDEIRKVLEKVERDAK

SEQ ID NO: 23957 - protein, 56 aa, Artificial Sequence
  Synthetic
REKEEAEDRMRRILEEVRRTLEEVHKENRRLLEDTRRTVERIERENRKIVEEVRRV

SEQ ID NO: 23958 - protein, 56 aa, Artificial Sequence
  Synthetic
IETLERRVREVVERVKKELERLLRENKKSTEEVKRTAEDLLRKNREVVEEVKKAAK

SEQ ID NO: 23959 - protein, 61 aa, Artificial Sequence
  Synthetic
DEVEELERRLEELLKKSRDEVTKLADELDRVLERSREVVKKDRESLKEILKEVERLVREKN

SEQ ID NO: 23960 - protein, 59 aa, Artificial Sequence
  Synthetic
KELLDRLEKELRESVKRSEERLKELADRIRKSLEDSERLSRRTNERIKRVLEEVTERVK

SEQ ID NO: 23961 - protein, 61 aa, Artificial Sequence
  Synthetic
DEVEDVSRKLDEALERSRRITEDLEKKLREVIETSKREVDKLAERLDEVIREIEERIRKKN

SEQ ID NO: 23962 - protein, 59 aa, Artificial Sequence
  Synthetic
KELIEKLEEDIRRVLEKIKREHERLLRKIEESLKDSKRRLDKLRRDIERILERIREALR

SEQ ID NO: 23963 - protein, 60 aa, Artificial Sequence
  Synthetic
REIEEALRELEEVLRKVKEDNKRLEEEIRRVLEEVKRINEKLLRDAKKELDRVKEILKDT

SEQ ID NO: 23964 - protein, 55 aa, Artificial Sequence
  Synthetic
EEAKKELRRLVKEVEDVVRTSTRRLEELVKEVRRVSEETKRALDELVKEVREEVR

SEQ ID NO: 23965 - protein, 60 aa, Artificial Sequence
  Synthetic
DEIEDVERKIKEVVDRVRDINRRLRDTIRRVLEKVTRINEELRDTVRKVLKEVERILREI

SEQ ID NO: 23966 - protein, 55 aa, Artificial Sequence
  Synthetic
EEIKEKLERLVREVKRISEESAKDLERLVREVEKVVEDSERELRRLVEEVERRRK

SEQ ID NO: 23967 - protein, 60 aa, Artificial Sequence
  Synthetic
SEIEKVRKEIDEVLKRVRKINEDLLRELEEVSKRSKDINDDDLRTNTEVLKEARRILKDS

SEQ ID NO: 23968 - protein, 55 aa, Artificial Sequence
  Synthetic
KDVTKELDELVREVEEEVRRSKDTLRRIVEENREVVERSERKLKKSSDDVREERR

SEQ ID NO: 23969 - protein, 60 aa, Artificial Sequence
  Synthetic
SELEKVLRELEENSRRNEEELRRSNDKVRRVLDEIRRKLEEVLRKVEEVLRRIEEELSDK

SEQ ID NO: 23970 - protein, 60 aa, Artificial Sequence
  Synthetic
VKDKVKKAEDDVRRLLERNRRLVEESKKSSEEFLRRVEKLVDDARKKVEDALRKVRETAR

SEQ ID NO: 23971 - protein, 60 aa, Artificial Sequence
  Synthetic
SELEKVLRDLEKNSRENEELLRRSNKKLKDVVDKIKKKLERALEELREVLEKIRRELSRS

SEQ ID NO: 23972 - protein, 60 aa, Artificial Sequence
  Synthetic
MDDKVRKAEEDVKRILDENRDLVRRSEENSKRLLERVRELVERVKDAADKLLREVREEAR

SEQ ID NO: 23973 - protein, 60 aa, Artificial Sequence
  Synthetic
SELETVLRELEENSRRNEELLRRSLDRVRRVLEDVTKKLREVLEEVRTVLEDVKRKLSRV

SEQ ID NO: 23974 - protein, 60 aa, Artificial Sequence
  Synthetic
VRDKVKEAKDRVRKILEDNRRLVEKSEEDSKRILETLRKLVEEMKRELERIETELREAAR

SEQ ID NO: 23975 - protein, 60 aa, Artificial Sequence
  Synthetic
SELETVLRKLEENSRRNKKLLRDVLEEDKTVLRDVERKLREVLDELRKVLEDIRDKLSRK

SEQ ID NO: 23976 - protein, 60 aa, Artificial Sequence
  Synthetic
VKDKAETMKKAVEEILDRNRKLVTEAEKRSEDSLRKLRKSVKEVEEKVKRVLEEVKKEAD

SEQ ID NO: 23977 - protein, 60 aa, Artificial Sequence
  Synthetic
DELERLLEELERNSRENKKRLDESRKRVKEVLDRIEKKLRDVLREVEDVLRKIREKLERK

SEQ ID NO: 23978 - protein, 60 aa, Artificial Sequence
  Synthetic
VKDKVKELRDRVKELLDRNREEVRKSEEDSKRVLDEVKRLVDELRERLREIRKRVEEEAK

SEQ ID NO: 23979 - protein, 60 aa, Artificial Sequence
  Synthetic
SELEDVRRELEENSRRNEETLRRSLAELEENSERNRRELERVLAEVEKVLKKATETLSRV

SEQ ID NO: 23980 - protein, 60 aa, Artificial Sequence
  Synthetic
VRKEVKKVEDDVRRILEENRRLVEESERRSRRILEENEELVEDIKRKLREIEKELRERVR

SEQ ID NO: 23981 - protein, 60 aa, Artificial Sequence
  Synthetic
SEVEELEREIRELVERNRELVRRLEEEARRLSRRNEELVRELKERAERLVKELKERLDRV

SEQ ID NO: 23982 - protein, 59 aa, Artificial Sequence
  Synthetic
KDTLDEVRKEVRKLSKENEERLREVLEESRRLSKRNEEILKEIAERVKRLVDKLTDDIR

SEQ ID NO: 23983 - protein, 57 aa, Artificial Sequence
  Synthetic
SEVEDVERRVRKLLEENDRLLEENEKSARELMKRDKKVSDENEKSVRDLLDRLRKEI

SEQ ID NO: 23984 - protein, 56 aa, Artificial Sequence
  Synthetic
LEELLKKLRKLSEDNERLLRESNERAKRSTDESERLSRETNERVKDVVTRLKEASK

SEQ ID NO: 23985 - protein, 57 aa, Artificial Sequence
  Synthetic
DEVDEARKEVDKLAKENTELVKRNKDSVKELVREDEDELRKNRESVDELLRRLEEEI

SEQ ID NO: 23986 - protein, 56 aa, Artificial Sequence
  Synthetic
LEEVLKTLREVSDRNKKLLEESNERVRKSTKESKDKLRKSNEEVKRVLKELRDTDT

SEQ ID NO: 23987 - protein, 59 aa, Artificial Sequence
  Synthetic
DELDRLLEEVKRSLEDVEEKLKKLEEEVKRVNDELRKRLTRLLREVERSLKRVEDLIRN

SEQ ID NO: 23988 - protein, 56 aa, Artificial Sequence
  Synthetic
LEEVRERLKESLDRLRKRVEDLKRRLRESLESVRKLVEDLERALRKSLEELRERVR

SEQ ID NO: 23989 - protein, 59 aa, Artificial Sequence
  Synthetic
EELDRLLKRVEESLRRVERILKELLDRVRKVNEDVKRTLDDLLRRSKESLDRVRKLREE

SEQ ID NO: 23990 - protein, 56 aa, Artificial Sequence
  Synthetic
LEEVEERLKRSLRELERLVRELEEELKKSVKSVRDLLEELKRRNEDSLRRLAEEIK

SEQ ID NO: 23991 - protein, 59 aa, Artificial Sequence
  Synthetic
KELDDLLREVERSLDRVRKRLEDLLREVERVNEEVKKRLRDLLEELKRVADELRKLRED

SEQ ID NO: 23992 - protein, 56 aa, Artificial Sequence
  Synthetic
LEDLERELKRSLKELRDEVRELEERLRRSVESVRRVLKELEERARRLLKEVRDEIK

SEQ ID NO: 23993 - protein, 59 aa, Artificial Sequence
  Synthetic
SELDKLLEDVKRSLDEVKRLLKELLDRVKKVNKELEEVLKRLEEDSRRVVEEVEKATRD

SEQ ID NO: 23994 - protein, 56 aa, Artificial Sequence
  Synthetic
LEDLERKLEDSLRRLEELLRRLEDELRKSLTSVRKRVKELEEKNRELLKRVEEKIR

SEQ ID NO: 23995 - protein, 59 aa, Artificial Sequence
  Synthetic
KELDELLKRIEDVVRRLEEELKRLLDEARKVNEDLERRLRKLREDVERSLREVDKMIRN

SEQ ID NO: 23996 - protein, 56 aa, Artificial Sequence
  Synthetic
LKDLEKALEELLDRVRRLVKELRDRLRDSLRSVEEEVKKLKDELDRSRKAVRDKVK

SEQ ID NO: 23997 - protein, 59 aa, Artificial Sequence
  Synthetic
SELDRLLERVRKSSTDSEKTLKELRDEIRRVNDEVRKVLEELLKESRRVAEEVKKVIDN

SEQ ID NO: 23998 - protein, 56 aa, Artificial Sequence
  Synthetic
LEDLERELRRLLRRDRELVKKLEEDLRRSLKSVEEEARRLERANRELLREVEEKAK

SEQ ID NO: 23999 - protein, 59 aa, Artificial Sequence
  Synthetic
SELDKLLRDVEESSRRSEETLRKLEKEVRDSSTESERILRELRDRIKKVADDVEKVIRD

SEQ ID NO: 24000 - protein, 56 aa, Artificial Sequence
  Synthetic
LEELEKRLEDLLRRDKKLVDDLRKKLRDLEKRDRDLVEELRRELEELLKRVEDAAR

SEQ ID NO: 24001 - protein, 59 aa, Artificial Sequence
  Synthetic
SELDRLLREVEKSSKRSEETLRDLRREVEDSSRRSEEILRRLLEESEKVAREVRKLIED

SEQ ID NO: 24002 - protein, 56 aa, Artificial Sequence
  Synthetic
LEELEKRLRELLKRDKELVDELRKRLEELLKRDRELLKRLEEENRRLLEEVERRAR

SEQ ID NO: 24003 - protein, 59 aa, Artificial Sequence
  Synthetic
KELDELLDEVRRSSETSERILRKLLREAEESTDRSKRTLKELLRELEEVVERVKKMIRD

SEQ ID NO: 24004 - protein, 56 aa, Artificial Sequence
  Synthetic
LKDLEKALRDLLDRDRKLVEELEDRLRKLAEEDEKVLRELEEELKRLLEEVAEETR

SEQ ID NO: 24005 - protein, 60 aa, Artificial Sequence
  Synthetic
SLLEKLERDLERVHKESEDLARELRKELKRVHEESRELMKEIDKELRRVLEEVKSLLRRG

SEQ ID NO: 24006 - protein, 62 aa, Artificial Sequence
  Synthetic
EDVKDKVRRVEEKVEELLDRNRKLVEEVRREVEKVLRDDRRLVREVERKLKEALDEVRERVR

SEQ ID NO: 24007 - protein, 60 aa, Artificial Sequence
  Synthetic
SEVEEVERRVDEVLKELKRKVDRSREESERIARELERLVEESEKKVRDVVRELEDLLRKV

SEQ ID NO: 24008 - protein, 54 aa, Artificial Sequence
  Synthetic
DLKEKIKEVEDRVDKVIKENKDLLDDVERRVRKVIKENEDLIKELRKRVEEVAR

SEQ ID NO: 24009 - protein, 60 aa, Artificial Sequence
  Synthetic
SKVEELEKRVRKVMEKLKKLLKDSEKESDDVARRLEELLEESEREVREVLRELEDLLRKV

SEQ ID NO: 24010 - protein, 54 aa, Artificial Sequence
  Synthetic
DVDETIKRVEEEVKKVVDDNRRLNEEILRKVKKVIDDNRRLIEKVREDVDRMAK

SEQ ID NO: 24011 - protein, 57 aa, Artificial Sequence
  Synthetic
SVVETVDKRLKRLLEKVEKSTEDSRRTAEESKKRVDRSTERVKEVLDRLRREVERLK

SEQ ID NO: 24012 - protein, 59 aa, Artificial Sequence
  Synthetic
KEKVRTVEKRAEDVIREARKLLEESKRRHDKVVEELERLLKKSKEDVDRVIKELEERRK

SEQ ID NO: 24013 - protein, 57 aa, Artificial Sequence
  Synthetic
DEVEEVKKRLDELRKEVERSTREVREVLKKLLKEVKDSTDDVRRTIEKLLRDVERLK

SEQ ID NO: 24014 - protein, 59 aa, Artificial Sequence
  Synthetic
KEELKKVEDRVREVIKDLEELLRDSKRTVEKVERELEDLVRKSEEEAERVERELEERAR

SEQ ID NO: 24015 - protein, 56 aa, Artificial Sequence
  Synthetic
SVVEEVDRLLEELLRKVKKSTDESKETAKESRKEVKRSTEDNDRTVEKLRDEVRRL

SEQ ID NO: 24016 - protein, 59 aa, Artificial Sequence
  Synthetic
DDRVREVETRVKKVIDDVRRLVTESKKDHERVVKELRELVEESKRRNDRVVEEAKETAR

SEQ ID NO: 24017 - protein, 56 aa, Artificial Sequence
  Synthetic
SMVEEVKKVLEKLKRDVDKSTDEVRDMLRRLLEEVRESSREVERRLRELKEEVDRF

SEQ ID NO: 24018 - protein, 59 aa, Artificial Sequence
  Synthetic
KEEVKKVKKEVDEVIRRLKELVRRSEEEARRVIKTLEKLLRDSKKRVEDVIKDLDRTVR

SEQ ID NO: 24019 - protein, 57 aa, Artificial Sequence
  Synthetic
SMVEKVEEDLKKLTRDVEKSTEESRKTAEDSARDVRRSSREVEDVLRRLRKEVEELK

SEQ ID NO: 24020 - protein, 59 aa, Artificial Sequence
  Synthetic
KEEVKKVEDKVKEVIERLKKLLDESKKRHEDVIRELEKLLEESERKVRKIIRELEETLR

SEQ ID NO: 24021 - protein, 57 aa, Artificial Sequence
  Synthetic
SVVEEVKRRLEELEKRVEDSTRDSKRTLDESERELEESSRDNRRTVEELLDELRRLK

SEQ ID NO: 24022 - protein, 59 aa, Artificial Sequence
  Synthetic
KEEVEKVEREVREVIKKLRDLVRRSREEHEKVIEKLKRLLEESEDTNRKVIKKVEDDLR

SEQ ID NO: 24023 - protein, 61 aa, Artificial Sequence
  Synthetic
SVTDEVREKLRRLLEELREVVKRVEDISRKTHEETKRVVEKVKRILEKLKREIEEVIRELG

SEQ ID NO: 24024 - protein, 59 aa, Artificial Sequence
  Synthetic
KEDLERLRRDVERVIREIEKLLRDVEEKVKETIKTDEDLLRRVKEDVERVLEEIDRRLK

SEQ ID NO: 24025 - protein, 61 aa, Artificial Sequence
  Synthetic
SVAETVKERLKDLHRRTKESNERAKRISDELNKHNEKSVRDVDREVKRLLEEITEVIKRLG

SEQ ID NO: 24026 - protein, 59 aa, Artificial Sequence
  Synthetic
KEALRKLDEEVKKVADDDRRLNEESRKRAKDSIEESRKLVRDVAERVKEVARKIREDLR

SEQ ID NO: 24027 - protein, 60 aa, Artificial Sequence
  Synthetic
DEARELIERVKRVLDRVREENTRVNKELHDILRRVEKRNRDLLRELREILKDVKKKADEV

SEQ ID NO: 24028 - protein, 55 aa, Artificial Sequence
  Synthetic
RELEKELRRLIAEVARIVEESRRNLERIEEAIKRISETSEKEIREIEDRIKKDVD

SEQ ID NO: 24029 - protein, 60 aa, Artificial Sequence
  Synthetic
SEAERAREEAKKLKEEIKKSNDELRKAAEKLKRDIERSNDELRKAIEELKRRVESLLRRV

SEQ ID NO: 24030 - protein, 55 aa, Artificial Sequence
  Synthetic
DEVLKEVKRIAEELHRHNREVLERIEKIARELEKHNRDVLDDIRRIVEKLERDLN

SEQ ID NO: 24031 - protein, 60 aa, Artificial Sequence
  Synthetic
SEEERAREDLERLREEIRRSNEKLEEDSDKLRRDIEESNRRVEEEIRRLKEDVERKLKDV

SEQ ID NO: 24032 - protein, 55 aa, Artificial Sequence
  Synthetic
EEVLEEVRRLVKKLHEHNEESLRRSEEILKDLERHNRDVLREVEEIVREALERLD

SEQ ID NO: 24033 - protein, 60 aa, Artificial Sequence
  Synthetic
REAEEAKKEADRLEEEVRDSNRKLEEDSKRLEREIRESNRKLKETAERLLRDVERLLKDV

SEQ ID NO: 24034 - protein, 55 aa, Artificial Sequence
  Synthetic
KEVLEDIRRIVKELHDHNKKSMEDSRRIIEELKRHNKRVIDEVKKIVDELREKLR

SEQ ID NO: 24035 - protein, 60 aa, Artificial Sequence
  Synthetic
REAEEAEKELKRLEDDIKKLVEDLDREAKRLKKEVDDSNRELEKESRRVKKEVRELLKDV

SEQ ID NO: 24036 - protein, 55 aa, Artificial Sequence
  Synthetic
DRMLEKVKRIVDELRKLLKTVLDDVRRIVEELHRHNKESMERTRKILEDLARRLT

SEQ ID NO: 24037 - protein, 60 aa, Artificial Sequence
  Synthetic
SEAERAREVLERLREEVERSNKRVREELKRLTEDVRRSNKKLREDSEEVRKRVEDLLKDV

SEQ ID NO: 24038 - protein, 55 aa, Artificial Sequence
  Synthetic
DEMLRRVRRIIEELHRLNKEALDRVRKIIEDLHRKNEDSLKKTEDILRRLEEELR

SEQ ID NO: 24039 - protein, 56 aa, Artificial Sequence
  Synthetic
SSIEEVLERLRRLSDEVRKRTDDVLERAREISRETEERSRRINEEIERIVEELKKR

SEQ ID NO: 24040 - protein, 59 aa, Artificial Sequence
  Synthetic
KEAVDRARREVERLVKENEDILKRLEEEVRKLVKRNEDLVEENRREVEKWRKELEDRKR

SEQ ID NO: 24041 - protein, 56 aa, Artificial Sequence
  Synthetic
SEIDEVLKKLRDDSKKVEEDTRRVLEELERISEKTRKDSEEVLREIEDIVEKLKRR

SEQ ID NO: 24042 - protein, 59 aa, Artificial Sequence
  Synthetic
REEVERAEEEVRKLVEENKRIVKEAKERVDELVERNKEIVEEIRREVERLKKELEDRRR

SEQ ID NO: 24043 - protein, 57 aa, Artificial Sequence
  Synthetic
REVEEVTKELRKISKEVEDLTREVLREAREISRRTEEESRRLNKEIAEIVERLRREG

SEQ ID NO: 24044 - protein, 59 aa, Artificial Sequence
  Synthetic
KEDVRRVAEEVKRLVDKNRRIVEEAKKEVDRLVKRNEDLMRRNREEVERWKRELEEDRR

SEQ ID NO: 24045 - protein, 57 aa, Artificial Sequence
  Synthetic
SEVDEVLKTLKKLSDDARKKTKEVLDRLRDISRRVEEESRKVLEEIRRKVEEVKKRR

SEQ ID NO: 24046 - protein, 59 aa, Artificial Sequence
  Synthetic
KDKVRKVKEDVRRLVEDNKRIVKEAREEVERLKERNKDIVRRIKETVDRLKDELRKRAE

SEQ ID NO: 24047 - protein, 57 aa, Artificial Sequence
  Synthetic
SDVDRVLKELEDISKDVEDKTREVLKRLKEISDEVKKRSEDINREIARIVEDLERRR

SEQ ID NO: 24048 - protein, 59 aa, Artificial Sequence
  Synthetic
KEKVKDARRVVRELVERNKEIVRRAAEVVKKLKKENAKLVEDNTREVKKWKERLERRRR

SEQ ID NO: 24049 - protein, 57 aa, Artificial Sequence
  Synthetic
SEVEDLLRKLKEISDESRERIKRLLEELEEISRKSKEDSERSNEELHRIVKRLKEEN

SEQ ID NO: 24050 - protein, 59 aa, Artificial Sequence
  Synthetic
EEDLRRAEDDVRRLIEDNKRLLEEAKRRVDDLRRKNEEILRESEKNVRRIEKELEDRRR

SEQ ID NO: 24051 - protein, 57 aa, Artificial Sequence
  Synthetic
SEVEDLLRKAEEISDRSRREIEKLLRELERIVREVRERSKRSNDELHRIVKELKEER

SEQ ID NO: 24052 - protein, 59 aa, Artificial Sequence
  Synthetic
EKKLRDVEKRARELIRDNERLLEDAKRRVDELRRELKKILDDSRRNVERIMKELDDEKR

SEQ ID NO: 24053 - protein, 57 aa, Artificial Sequence
  Synthetic
SEVDELLKRLEEISEESRRRSEDSNREVHEIVKEVKKRSEDSNRRLHKIVEDLKREN

SEQ ID NO: 24054 - protein, 59 aa, Artificial Sequence
  Synthetic
KDELKRAEDRVRELIKENKRILDESKENAERIDRELKKILEDSKRNVEEIAKRLEEDRK

SEQ ID NO: 24055 - protein, 57 aa, Artificial Sequence
  Synthetic
KDVEKLLRELEKISEDSKRESDKSNKEVHDSSREVERRSRESNRRLHKVVEDLKRTN

SEQ ID NO: 24056 - protein, 59 aa, Artificial Sequence
  Synthetic
DEDLRRAKREVERLIRENEKILEDSRENLRRIAERSRRVLEESERNVRRLIEELEETRR

SEQ ID NO: 24057 - protein, 57 aa, Artificial Sequence
  Synthetic
REVEELLKDLRRILEEVKRRIEKLLDELRKISEESRRRSEKSNEELHDIVKKLKDEN

SEQ ID NO: 24058 - protein, 59 aa, Artificial Sequence
  Synthetic
EKTLRDAEREVKKLIDTLRKILEDARREVKKLIDKNEKILRDSEKNVRDIAEELRRTRK

SEQ ID NO: 24059 - protein, 57 aa, Artificial Sequence
  Synthetic
DEVRELLREVKEAVDEVRRRSEESNREAHRVSEESEKRSRESNKRLHEIVEDLKRRN

SEQ ID NO: 24060 - protein, 59 aa, Artificial Sequence
  Synthetic
EEKLKRAEEEIRKVIEDLRRILRESRENAKRIIRRNREILRESKKNVEDLERELEETRR

SEQ ID NO: 24061 - protein, 57 aa, Artificial Sequence
  Synthetic
SEVEELLKRLRESSRRVRELSKRSNEEVHRSSDKVRRDSEESNRELHKIVEDLKREN

SEQ ID NO: 24062 - protein, 59 aa, Artificial Sequence
  Synthetic
ERKLREARKEVKKLIEESREVLERSERNIRELIKESRRLLEESRRNVERLKKELEDTRK

SEQ ID NO: 24063 - protein, 60 aa, Artificial Sequence
  Synthetic
SEEDEARKDVKELEDRLRKINEDSERAVRRIEEELKRILEENDREVKRLLRKIEELLRRK

SEQ ID NO: 24064 - protein, 56 aa, Artificial Sequence
  Synthetic
IETVIRELRKALEEAARRSKRLIDELKKVLEEVKRANEETNKRLTEVVEEVAERIR

SEQ ID NO: 24065 - protein, 60 aa, Artificial Sequence
  Synthetic
KEKEDAEREVERLERESRRVNRESEEEIKRLLRESEKVNEDSEREVRRIREELERLLRKK

SEQ ID NO: 24066 - protein, 56 aa, Artificial Sequence
  Synthetic
IDKVLTELRRSSEEVTRLSEELIERVARSSRKVKELSRKLIEELRKVLKDVARRLE

SEQ ID NO: 24067 - protein, 60 aa, Artificial Sequence
  Synthetic
EELERLEKDLREVIKDSERSSDDVRRRLEEVIRDNERLLEELDERLKEVIRDVEDLLRKK

SEQ ID NO: 24068 - protein, 59 aa, Artificial Sequence
  Synthetic
KKLIDDLRRKIEESLKDSRRLDEEARKEIERISRKTREDIKELLDRIKEVLDEIRERIR

SEQ ID NO: 24069 - protein, 60 aa, Artificial Sequence
  Synthetic
DELEDLERKLKEIIDDSKRLLDELEKRLRESNREVERLLDELRKELEKVIRDVEELLKKK

SEQ ID NO: 24070 - protein, 59 aa, Artificial Sequence
  Synthetic
KELIDKLVRELEKSLEESRRLIEELRKEIERTSREIEKRIRDLLKEIKDVLDDIRRRIE

SEQ ID NO: 24071 - protein, 59 aa, Artificial Sequence
  Synthetic
SELEEVEKRAEELARTLEELNRDVNRRLEELLRRLEKINRTVNDELRKLLEELKDVRRR

SEQ ID NO: 24072 - protein, 59 aa, Artificial Sequence
  Synthetic
KEDLDRLDKRVRDIVRDLERINEETRKTLEEIRERLERILKRTEENLKEIKEEVRKDEK

SEQ ID NO: 24073 - protein, 60 aa, Artificial Sequence
  Synthetic
SELEKVTEDVRRLLERLRDINRRVNEALRRLAEELKRLNDEVNKLLRELVTELKKASKDG

SEQ ID NO: 24074 - protein, 59 aa, Artificial Sequence
  Synthetic
KDKLEELKREVERIEKDVREILKRTEDNLRRIVEELKEINERTEDSLRKIVRELSEDRK

SEQ ID NO: 24075 - protein, 60 aa, Artificial Sequence
  Synthetic
REKDELRKKVEELLKRLEEISKRTKDSVERVLRELDKITKESKKRAKKLVDRLKELLKRV

SEQ ID NO: 24076 - protein, 59 aa, Artificial Sequence
  Synthetic
ERAIEEVLKTIEELIKEVEDVNRRVNETIRELLERLRRANEDVIRKVEKLIKEVEDATR

SEQ ID NO: 24077 - protein, 60 aa, Artificial Sequence
  Synthetic
SEKERLRDMLRKIRETLDRISEDTKRSLDEVRRRLEEISKRTKDNARKLVRELEELLRRV

SEQ ID NO: 24078 - protein, 59 aa, Artificial Sequence
  Synthetic
EEFVKRVEDTLRELLDRVRRENERVNRDIDRLLKEVEERNKRVNDELRKLIEDVKEAAR

SEQ ID NO: 24079 - protein, 60 aa, Artificial Sequence
  Synthetic
DDVRELIERLERILKRVEDINRDVNRKLRRVLERVRKDNEDSNRKTEKVLRDVKERADEI

SEQ ID NO: 24080 - protein, 59 aa, Artificial Sequence
  Synthetic
EKLLRDVERELKRVREDLERILRESRDVVRRVKEELDKILEESRRKVEKVRKDLEDTRK

SEQ ID NO: 24081 - protein, 60 aa, Artificial Sequence
  Synthetic
SEVEKLITDLRRILKEVEERNRELNKRNDETLKRVEETNRRVNKELKEILDRVIDEARRK

SEQ ID NO: 24082 - protein, 59 aa, Artificial Sequence
  Synthetic
EDLLRRVEEELRKVEKDLKRILDKSRDDLRKSRERLERILRRSEEIVREVEERLRRAAT

SEQ ID NO: 24083 - protein, 60 aa, Artificial Sequence
  Synthetic
DEVRKIIKELEEILEEVRKRNEKLIRENEETLERVRKINEKAIRELEDILRRVKEAVERK

SEQ ID NO: 24084 - protein, 59 aa, Artificial Sequence
  Synthetic
EDVLRDAERRVREVREKLERINKTSRDRLKRSKEEADRINKESREVVKRVKEELEKTAT

SEQ ID NO: 24085 - protein, 60 aa, Artificial Sequence
  Synthetic
DEVERVIRELERILREVEKRNRDVLRKNEETLREVRERNERAIEELRRILKKVKEEAERK

SEQ ID NO: 24086 - protein, 59 aa, Artificial Sequence
  Synthetic
EDVLRTVRKKVEEVREALDRINETVKKALDDSRRRLEKINRDVRRDVEKVREDLERTAT

SEQ ID NO: 24087 - protein, 60 aa, Artificial Sequence
  Synthetic
DEVKKLIDDLRKILDRVRKENRRVIEELRKILEDVERRNREAIERLERILRRVVDLMRKK

SEQ ID NO: 24088 - protein, 59 aa, Artificial Sequence
  Synthetic
EEVLKRVREEVDRVRRELDRINEDSERVLRDVARELERINREVRKRLKEVEKRLREAAK

SEQ ID NO: 24089 - protein, 60 aa, Artificial Sequence
  Synthetic
SEVEKIIKELREILERVREDNRKIIDDLRKILKEAEDTNRKVIKELKEILKDVSKLMKEK

SEQ ID NO: 24090 - protein, 59 aa, Artificial Sequence
  Synthetic
EELLKEAEKDVRRVKEKLDKINRDVREELKKVAEDVKRINDRSREELRRVKEELKKDSD

SEQ ID NO: 24091 - protein, 60 aa, Artificial Sequence
  Synthetic
KEVEKVIEELRKILDDARRENERLLRELEEILKRVEERNRKLLEDLRRILEEVRKKAKDI

SEQ ID NO: 24092 - protein, 59 aa, Artificial Sequence
  Synthetic
EEVVKRVEEELKKVKEDVERINKEVRDRLREVEERLEKINEDTERTLKKVKDELEETKR

SEQ ID NO: 24093 - protein, 60 aa, Artificial Sequence
  Synthetic
DELRDVLRRLREVLTELEKENRKSIEELKKLNEDVARDIKRVIDELRKLLKRVKEEIEKN

SEQ ID NO: 24094 - protein, 55 aa, Artificial Sequence
  Synthetic
EEVRKELEDVRRKAEKILRDNDERLKESNRHMEKLLREVKEELKRVRDAVEEARK

SEQ ID NO: 24095 - protein, 60 aa, Artificial Sequence
  Synthetic
DEVRDVIKKLKDLNDRLDDENKKSIEDLKRELERLERRNRDSIRRLEELLKDVADKIRRR

SEQ ID NO: 24096 - protein, 55 aa, Artificial Sequence
  Synthetic
KDVRKRLRESNEHMKELLKENKELLKRLEDEVKRILERNKKELDRVLRRAEELRK

SEQ ID NO: 24097 - protein, 60 aa, Artificial Sequence
  Synthetic
RSVEEVRKVLEELKREHEKISKKTEEVLEDLKRRHEEIIKRVRDVLREIEEDLRRIRSRV

SEQ ID NO: 24098 - protein, 59 aa, Artificial Sequence
  Synthetic
DEKVEKVIRELRRSVEDSKRRNDEAIRRLEESVRKSSDEVRRAIKELRDLLKKVRDTTK

SEQ ID NO: 24099 - protein, 60 aa, Artificial Sequence
  Synthetic
STVERVREEADRLRKEHERISDETRKVLRKLEEDHERISRRTEELIERIEREVRKIESRV

SEQ ID NO: 24100 - protein, 59 aa, Artificial Sequence
  Synthetic
DEKVKRVEEEVRRSVEESKKENKKVIDDARRSVKRSEDRNREVIKEVKRLLDTVRERAK

SEQ ID NO: 24101 - protein, 60 aa, Artificial Sequence
  Synthetic
STVEDVRRRADELRRRHKKISEETERVLRRIEEAVRRILEDLRRILKEIEDRVRELLSRV

SEQ ID NO: 24102 - protein, 59 aa, Artificial Sequence
  Synthetic
DEKVKEAKRRVTESVRKSKDRNRRVIEEVDRLLKRVEEEVRRVKEEAKELLREVAERTK

SEQ ID NO: 24103 - protein, 57 aa, Artificial Sequence
  Synthetic
SSVEKVIEDLRRISEKVKKRTEDVLREAEKILRRVEKDNKKVNDDARRIVEELERRG

SEQ ID NO: 24104 - protein, 59 aa, Artificial Sequence
  Synthetic
KRLVDRVREAAKDIEDENREVLRRVEEILRRIEEELKRSSDETEKAVREIKRRLDERAR

SEQ ID NO: 24105 - protein, 57 aa, Artificial Sequence
  Synthetic
EEVERVLEEIKRISTDVARRSKEVLKRARESSERVKRRTEEVLEEIRKTNEDVARRA

SEQ ID NO: 24106 - protein, 59 aa, Artificial Sequence
  Synthetic
KKVVDRLRKEVKRNEDENREMVREVEEEVRRLEKENEEAVRRAADIVRRSEEHLRERTR

SEQ ID NO: 24107 - protein, 60 aa, Artificial Sequence
  Synthetic
KEVEDLLREVEKSSEKVRELIERSIRELERILEKVAEEIRRSIEELEKILERVAEVAKRR

SEQ ID NO: 24108 - protein, 59 aa, Artificial Sequence
  Synthetic
EKIVKRVEDEIRRLMKKSDELLERSTKVVEDIKRELEKLLETSSRMAEDIKRKLEELRR

SEQ ID NO: 24109 - protein, 60 aa, Artificial Sequence
  Synthetic
SEVEKLIEELERILEEVARRLKKSNEDLRKILKEVAKRIKDSIRDLRRILEEVADELRRR

SEQ ID NO: 24110 - protein, 59 aa, Artificial Sequence
  Synthetic
ERIVEEVERAAEEIKRRLEELVRRSEKSVEEIERELRKLLKDSSDVVREIKKRLEDERR

SEQ ID NO: 24111 - protein, 60 aa, Artificial Sequence
  Synthetic
SEVEKLLKEVEDSSRKVEEDLRDSNRELKKILDEVADRIRKSIKRLEDILKKVAEDAKRR

SEQ ID NO: 24112 - protein, 59 aa, Artificial Sequence
  Synthetic
EKIVRDVERRVRELKERSRRIVEESERSAREIKRELKRLEDDSSRVVEDIRKKLEELAK

SEQ ID NO: 24113 - protein, 60 aa, Artificial Sequence
  Synthetic
REVEELIKRVEESSRDVERRLRESNEEVERSTRRVAEEIKKSIDRVREIVERVERKKERV

SEQ ID NO: 24114 - protein, 59 aa, Artificial Sequence
  Synthetic
EKIVERVRRVIEELKRRSDEIVKESERSVRRVEKETTELLEESSRAVERVERRLRELVR

SEQ ID NO: 24115 - protein, 60 aa, Artificial Sequence
  Synthetic
SEVEKLIEEVRRSSKKVEEDLDRSNRELEDILRRVAEELEKSNRELEKILKEVAERVKRR

SEQ ID NO: 24116 - protein, 59 aa, Artificial Sequence
  Synthetic
EEIVKRVEEEARRLKERSREIVKRSEDSAREITKALRKLVRDSEDSVRKIKEKLKEETR

SEQ ID NO: 24117 - protein, 60 aa, Artificial Sequence
  Synthetic
REVEELDKRLKESSTEVEERLRRSNREVEDSTRRVEEEARKSNEELREILERVAEDVKRR

SEQ ID NO: 24118 - protein, 59 aa, Artificial Sequence
  Synthetic
ERIVERVERSARELMRRSRDIVRRSKESIERLKKRTRDLVKESRESVEKIKRDLEELRR

SEQ ID NO: 24119 - protein, 59 aa, Artificial Sequence
  Synthetic
SEVEKLLKELEDSSKKVEDDLRKSNEELRKIVEEVADLIRRLNKELEEILREVRERMRR

SEQ ID NO: 24120 - protein, 59 aa, Artificial Sequence
  Synthetic
EEIVRRVEKIVRDLKRRSDELVRRSRKSVEEIRKELEELVERDRRSVERIKEELDKERK

SEQ ID NO: 24121 - protein, 60 aa, Artificial Sequence
  Synthetic
SEVEKLTKEVRDSSKRVEDELRKSNERLKESTDRVADEIRRLNKELKEILDKVAREVERR

SEQ ID NO: 24122 - protein, 59 aa, Artificial Sequence
  Synthetic
EEIVERVERDARKVKEDSKRLVEESEESVRRLKTDTERLVEEDKKSVDTIKEELKKLTK

SEQ ID NO: 24123 - protein, 59 aa, Artificial Sequence
  Synthetic
DEVEELRKELEDSSREVEELIRRLNKEVEKSTREVAKRVKDSNKRLDEILKKVAEEVKK

SEQ ID NO: 24124 - protein, 59 aa, Artificial Sequence
  Synthetic
REIVERVREEVEKLKKRSEDLLERDKESIDKLDKETKELVEESRKSVRDIERELKKLSD

SEQ ID NO: 24125 - protein, 60 aa, Artificial Sequence
  Synthetic
DEVEKLIKDVEDSSREVEERIRDLNRKAKKIVREVAERIRELNERLKEILDKVAEEVKRR

SEQ ID NO: 24126 - protein, 59 aa, Artificial Sequence
  Synthetic
EEIVKRAEKRIRELKKKSDELLKRDRDSMDRIKKELEKLTREDEESVRRIERELKRLAD

SEQ ID NO: 24127 - protein, 60 aa, Artificial Sequence
  Synthetic
SEVEKLIEEVRRSSEEVERRIKKLNDDVRRSTEKVEEDIRRLNEELKKILDEVAKEMERR

SEQ ID NO: 24128 - protein, 59 aa, Artificial Sequence
  Synthetic
ERIVRRVEKIIRDLKKRSDELLKEDRRSAEEAKRETDRLVEEDKRSVDEIRERLKELSR

SEQ ID NO: 24129 - protein, 60 aa, Artificial Sequence
  Synthetic
DEVEELLRRVEEIVERVAKRIEELNRRLEEILEEVARRSTKSIKELEDILRKVAKEMERR

SEQ ID NO: 24130 - protein, 59 aa, Artificial Sequence
  Synthetic
EEIVERVERRIRELKKRLEKLVRDDEESVKEIRKKLEELVKRSSDVVERIKRELDKLRK

SEQ ID NO: 24131 - protein, 59 aa, Artificial Sequence
  Synthetic
SEVEKLLRELRESSREVEERIRKLNRELEKIVRDVDRESARSIEELKRIAEEVAERAKR

SEQ ID NO: 24132 - protein, 59 aa, Artificial Sequence
  Synthetic
ERIVKEVEEEVRRLKKRSTKLLEDDRKSVEDIKERLKELVRRSSEVVKEIEERLKRLEK

SEQ ID NO: 24133 - protein, 60 aa, Artificial Sequence
  Synthetic
SEVEDLLRRVRESSKEVEERIRKLNDELRKSTKEVEDRSRRSIERLDRIVEKVAREVERR

SEQ ID NO: 24134 - protein, 59 aa, Artificial Sequence
  Synthetic
EKIVRDVEREVRRVKERSDRLLEEDRKSVEELKTRTDRLLEESSKRAEDIKRKLKELEK

SEQ ID NO: 24135 - protein, 60 aa, Artificial Sequence
  Synthetic
SEVEKLLREAKESSREVKDRSKKSIDELRESTKTVERLIRDLNRKLKEILDRVADDMRRR

SEQ ID NO: 24136 - protein, 59 aa, Artificial Sequence
  Synthetic
EKIVRRVEEIVRRLKKESKDLVEESTRVADELRRRTDRLVEEDERSVRKIKEDLDRLRK

SEQ ID NO: 24137 - protein, 60 aa, Artificial Sequence
  Synthetic
SEKEEAKRRARELEKRTDELLEESTRVNEESKRHLKELLDESRRTAKRVKEEIDKLLKEK

SEQ ID NO: 24138 - protein, 56 aa, Artificial Sequence
  Synthetic
VDTLLERVDRSSKEVADRMRKSNEEVKDVNRRVAKALKDSNRDVERVLEDVARKIK

SEQ ID NO: 24139 - protein, 60 aa, Artificial Sequence
  Synthetic
SEKETARKVIEELRKETERLLRESTKTNEDSSRHAKELLKRSEDVAREIEERIDRLLEEK

SEQ ID NO: 24140 - protein, 56 aa, Artificial Sequence
  Synthetic
IEEVIKRLEDSSRDVERRLRKSNEDVKRVNKEVADRLKESNDRLREELKKVEDDIR

SEQ ID NO: 24141 - protein, 60 aa, Artificial Sequence
  Synthetic
DEKEDAERKIRRLEERTKKLLDDSTKTNKESRDHLRKLLADSEKTARDIKRAIKKLLDDK

SEQ ID NO: 24142 - protein, 56 aa, Artificial Sequence
  Synthetic
VDTLLTEVTDSSRRVEEELKRSNDEVRRVNREVAERLKKSNRELEEVLRKVAEDIK

SEQ ID NO: 24143 - protein, 60 aa, Artificial Sequence
  Synthetic
SERERAEEEAKKAKKEAKRLLDESTKANEDSKRHADKLLEDSKRAAEDIKRKAEDLLRKK

SEQ ID NO: 24144 - protein, 56 aa, Artificial Sequence
  Synthetic
ARRAIEEVRRALKEAADASRDLNRRAKEANERAAKASEELNKRAEDALRRASEEIR

SEQ ID NO: 24145 - protein, 60 aa, Artificial Sequence
  Synthetic
SEKEEVKKRVDEIKERLKRLLDDSTRTNEESRKHIEDLLEESKKEIDKVRKDLERLLRKK

SEQ ID NO: 24146 - protein, 56 aa, Artificial Sequence
  Synthetic
VDTMTRKVEEVLRDVAEKIKELNRRVEEANKDMARESERLNREVRDVLRKVAKDIE

SEQ ID NO: 24147 - protein, 60 aa, Artificial Sequence
  Synthetic
SDEDRAREDLKRIKEELKRLLRESTEVNKESEKHIRKLLRESEETIRRLKKAIDDLLRKK

SEQ ID NO: 24148 - protein, 56 aa, Artificial Sequence
  Synthetic
IETILRRLERVLKEVEKKSRELNRRVKEVNEKVRRDIERLNKEVKDVLKTVAERIT

SEQ ID NO: 24149 - protein, 61 aa, Artificial Sequence
  Synthetic
DEKERAEERIRELKKRTEELLRESTRVNRESKEHAKELLKRSEDTIRELDERIRRLLERKK

SEQ ID NO: 24150 - protein, 56 aa, Artificial Sequence
  Synthetic
VDTVLARLEESSKEVEDRSKRLNEEVKKVNEEVAKRIKELNEEVERVLRRVAEEIE

SEQ ID NO: 24151 - protein, 59 aa, Artificial Sequence
  Synthetic
SLKEELREKVRKVKEDSERLLRDLERTVKKVREDSKRILDRNRETAKEIERRIRELERN

SEQ ID NO: 24152 - protein, 59 aa, Artificial Sequence
  Synthetic
EELVRKLRKELDDSLKRTKELVDRLKEDLERSLRDSEELARRLDRELEDVLRRIEDEAR

SEQ ID NO: 24153 - protein, 59 aa, Artificial Sequence
  Synthetic
SLLETLKEIVRRVERESARILEDNRRTVTRAKEESKKILDRNAKTVDDLRKEVERLKTE

SEQ ID NO: 24154 - protein, 59 aa, Artificial Sequence
  Synthetic
EELVRRLVEELEKSLRTTERLARELDRKIKESLDTSEELARRLDKRLEEVLKDVKRRAE

SEQ ID NO: 24155 - protein, 59 aa, Artificial Sequence
  Synthetic
RLEEELKKTVDRAREEVKRLLDRDRESVDDLRRAVEEILKTNRRTVEKLRKDLTDLRRN

SEQ ID NO: 24156 - protein, 59 aa, Artificial Sequence
  Synthetic
EKLVRELIEKIKKVLDEVRRLSEKLNEDLREILERVKRLADKLDEELKRMLEKVEETAR

SEQ ID NO: 24157 - protein, 61 aa, Artificial Sequence
  Synthetic
DDVERVKRDIDRLLEKVTRENEKVKEKMKELLDRAREVNRKVKEDIKRLLKEVEDVARREG

SEQ ID NO: 24158 - protein, 58 aa, Artificial Sequence
  Synthetic
EDVRDLERRLREVEEEARKLSEDVRRVLEEVRKELERLSRDTERVLKRVREEIRKIEK

SEQ ID NO: 24159 - protein, 61 aa, Artificial Sequence
  Synthetic
SEVEEVIRRVRKLLKDAKDLNEEVKRRLKELLDRVKRVSEKTKEDIKRLLEEVERVVRTKG

SEQ ID NO: 24160 - protein, 58 aa, Artificial Sequence
  Synthetic
DLAERVRDVLRRVAEAAKELSKDTKRVLDEVKKAIDELLKDNKRTVEEVEKEAKKTLK

SEQ ID NO: 24161 - protein, 61 aa, Artificial Sequence
  Synthetic
DEVEKVKKTLKKLLEDARRRNEEVRKEIEDLDRELERLNRESKKRIEDLLEEVKRVVDRDG

SEQ ID NO: 24162 - protein, 58 aa, Artificial Sequence
  Synthetic
ELVRELERVLDTVRREAERLSRKTREVVDESRRRNKKLLEEDERVVRKVVEDAERKLK

SEQ ID NO: 24163 - protein, 61 aa, Artificial Sequence
  Synthetic
DEVKKVIDDIKDLLRRVEEVSRRVNKELERLLREVREVNKDVKRKLEELLRRVKEVVRRDG

SEQ ID NO: 24164 - protein, 58 aa, Artificial Sequence
  Synthetic
DLAERVRKVLEDVTRAAKELIKRDKKSLEDVKREIEKLSRDVKRVLEKVAEDAKDTLR

SEQ ID NO: 24165 - protein, 60 aa, Artificial Sequence
  Synthetic
SEEEDLARVVERVERDLKRLDDDNKRVLDESRRRNEELVKRTAEIVERVRRELERLRREG

SEQ ID NO: 24166 - protein, 56 aa, Artificial Sequence
  Synthetic
VEEVKRTMEKLLDDVRKANEDSKREIEKSDDEVRKRNEEVVRDIERLLKEVEERAR

SEQ ID NO: 24167 - protein, 60 aa, Artificial Sequence
  Synthetic
SEEEDLRRRAEEVHRRNEELLRDNERTVKKVHDRNRELLEDLRRVVERIERELRRLEEEG

SEQ ID NO: 24168 - protein, 56 aa, Artificial Sequence
  Synthetic
VEEVKERIDRLHEELEKLSRTTKEKLKELHKRLEDVVREVKRRAEELLREIKERAD

SEQ ID NO: 24169 - protein, 60 aa, Artificial Sequence
  Synthetic
SEVEEVRKVVEEVKRELRRLSEDSRRVVEEIVEADKRLSEKNETSVREVKKALKKLKDDG

SEQ ID NO: 24170 - protein, 62 aa, Artificial Sequence
  Synthetic
KDAEELVRDVIRRAREVLKRVEDVHRKVKKDLKKVHDDNKKISEDIDRRLEEVLRKVEEDDR

SEQ ID NO: 24171 - protein, 60 aa, Artificial Sequence
  Synthetic
SEVEDVKRKVREIEKADEELSKRNEDSARESKKRLKEWSDDTKEVVERVRKRLKDLEDEG

SEQ ID NO: 24172 - protein, 62 aa, Artificial Sequence
  Synthetic
EEAERLVREVTKEMKDVHDKNKKLSEDIDKRVEDTNRRLKEVHERVKEEAKKVVRDLEETAK

SEQ ID NO: 24173 - protein, 60 aa, Artificial Sequence
  Synthetic
SLVETVEDVLREVEERLRKLLRDNEESVERIKKRDEDLSKENEESVKRVEDTLDELRERG

SEQ ID NO: 24174 - protein, 60 aa, Artificial Sequence
  Synthetic
VEELVRKVIEDARRLLDDVRRKSERLDREAERVHRENKKLSEDLDRRVKTVVDDVRERAR

SEQ ID NO: 24175 - protein, 60 aa, Artificial Sequence
  Synthetic
SLVEEVEKEARDIERRDDELSKRNEKVARDIEERDRRLSDEVREVVKRVKRELERLVESG

SEQ ID NO: 24176 - protein, 60 aa, Artificial Sequence
  Synthetic
AEKLVRRVIKDLRKLHKENEDLSREIDKRLEDAHKRNRDLVEEVKKRMERVREEVERAAR

SEQ ID NO: 24177 - protein, 60 aa, Artificial Sequence
  Synthetic
KEKEDVKKVVEDIERADKKLSEDNRRVVKRIEEADRKLSKENKESVERAKKRLDDLERRG

SEQ ID NO: 24178 - protein, 62 aa, Artificial Sequence
  Synthetic
EEAEELVRRVIKEMEEVHKRNRDLSKRLDDELKRIHKENEDRLRRLDEEIEKVVKKVEDDAR

SEQ ID NO: 24179 - protein, 60 aa, Artificial Sequence
  Synthetic
SLVEELRKDVEEIKKRLKRLVEENEKVVREVTEADKKLSKELEDEARDVKRALEELRRRG

SEQ ID NO: 24180 - protein, 62 aa, Artificial Sequence
  Synthetic
EEVEELVRRVREDMERVVREVEKVSRDLDREIRRVHRENRELIEDVKRKARKVLRDAEEEAR

SEQ ID NO: 24181 - protein, 60 aa, Artificial Sequence
  Synthetic
KIVEDVEKVVKEVDDRLKKLVDDNERKVREIIRRDEELSEKNEKSVRDVKEELKRLAEEG

SEQ ID NO: 24182 - protein, 62 aa, Artificial Sequence
  Synthetic
EEVEKLVREVIDRMRRVVREVEEMSKRLDEELEEVHRRNRETLTRIDEEAKKVVDDVDRRAR

SEQ ID NO: 24183 - protein, 60 aa, Artificial Sequence
  Synthetic
SVRETLEEVLRRIAEAIDELIKTLEKVLEESRREIERWKKENEDSLREIKKKLEDLEKKI

SEQ ID NO: 24184 - protein, 59 aa, Artificial Sequence
  Synthetic
EEKAKRALEEIKRLLERVKKRVEEALEEIKKSNKEAADIVRDIDRRLEELLRTVADKTR

SEQ ID NO: 24185 - protein, 57 aa, Artificial Sequence
  Synthetic
DEVEEVIKTSREINDRVRRELERVLRRSEEIIEEVAKSIEEVIKESEDIIRKVEKDG

SEQ ID NO: 24186 - protein, 59 aa, Artificial Sequence
  Synthetic
EELKRKIRDVLRDDERAARKWVRDLEEVNKRTEDKIRELLRKLEEVNEKTERDIRRREK

SEQ ID NO: 24187 - protein, 57 aa, Artificial Sequence
  Synthetic
EEVERVIEEIKKLLKDVAELVERVIKEIRKILDDVAKENKRLLDESRKIIKEVAERG

SEQ ID NO: 24188 - protein, 59 aa, Artificial Sequence
  Synthetic
EEVKRKIRKVLKEIKEEIEKLLKKLRDALRDVEEKIRDLTRRAREVNEKSREDLERRKD

SEQ ID NO: 24189 - protein, 57 aa, Artificial Sequence
  Synthetic
DEVEDVIRRLEEIIREVEDRLRKILETSKKIIKEVEDENRRVVTEIERILREVEKRA

SEQ ID NO: 24190 - protein, 59 aa, Artificial Sequence
  Synthetic
EELKRRIEEVLERLRRKIERLAKELKDVNDESEREARRLTEEVKRVLEEVARRIKEAAE

SEQ ID NO: 24191 - protein, 56 aa, Artificial Sequence
  Synthetic
REVEEVRKKIEEDIDRVDKELKEVLETSRDILRRVAKENEDVLRDLERLVDEVRRD

SEQ ID NO: 24192 - protein, 59 aa, Artificial Sequence
  Synthetic
EELKKKLEKVVRDLSKRLEELLKELEKVNEEVKRRLERLTEEVRKVLEEITKKLKERAR

SEQ ID NO: 24193 - protein, 57 aa, Artificial Sequence
  Synthetic
SKVEEVMRRLKEILKRVAEELEKVLTESEKILRDVADENRRVMEESRKILKDVAERG

SEQ ID NO: 24194 - protein, 59 aa, Artificial Sequence
  Synthetic
EEVKKKIDKVLEDVRKELDDLRRKLEEVNKRIEEEIRRLTEDVRRVNDEIRKRAEDRKR

SEQ ID NO: 24195 - protein, 60 aa, Artificial Sequence
  Synthetic
SLREKADEVVKRIKERLDRLEDKSREVVKDSRRKLREWYEKSKRAVEDIETKLDELRKDL

SEQ ID NO: 24196 - protein, 59 aa, Artificial Sequence
  Synthetic
KDMVEELIRELEKIVTDVAKKVEDTIEESRKINEEVAKRVEDTIKRLEDILRDVARRVK

SEQ ID NO: 24197 - protein, 60 aa, Artificial Sequence
  Synthetic
SLREKVDKVVEEIKRKLDKLLEDSERVVEKSERDLRRWLKEAEEVVREIEKTLKELEKRA

SEQ ID NO: 24198 - protein, 59 aa, Artificial Sequence
  Synthetic
KDVVEDLIRELEEIVRRVAEEVRTTIEDLRKINDEVREKVKRLIEELKKILDDVAEEVR

SEQ ID NO: 24199 - protein, 60 aa, Artificial Sequence
  Synthetic
SLEEKAREVVKEIRRRLDELLRKSHDVVREIEERLDKLEKESEDAVREIEKRLDELAKRI

SEQ ID NO: 24200 - protein, 59 aa, Artificial Sequence
  Synthetic
AKVVEKLIKELRDILREVAERVERTIRRLREIVKRVERKVERSIEEMERIVREAEEETR

SEQ ID NO: 24201 - protein, 60 aa, Artificial Sequence
  Synthetic
SLREKVDEVVKRIEKRLEELIRKSRKANEDIRKKLEELIKKSEDVVRKIKRELEELKRRV

SEQ ID NO: 24202 - protein, 59 aa, Artificial Sequence
  Synthetic
REVVEDLIRELEEILRKVAEEVEDTIRRLEKILKEVAERVERTIKDLEDIVRDVAEKVK

SEQ ID NO: 24203 - protein, 60 aa, Artificial Sequence
  Synthetic
SLREKVKRMVEEVKRELDELEKESNRAVERVERELEKLIRKSERVNERIRERLKELAARS

SEQ ID NO: 24204 - protein, 59 aa, Artificial Sequence
  Synthetic
DKVVEKLIKEVRDIVKKVAEEVKKTIEDVERKVKEVAERVEDTIRRLDEAVKEVEERVR

SEQ ID NO: 24205 - protein, 60 aa, Artificial Sequence
  Synthetic
SLREEAERVIREVREDLDRLRRESKKVNDRIRRTLDELRKRSDDAVRDIKEKLKELAKRT

SEQ ID NO: 24206 - protein, 59 aa, Artificial Sequence
  Synthetic
KDVVRELAERLKRLLEEVEKRVKDTIRELEKIVEEVRKRVEDTIRRLEEVLDKVAKEVT

SEQ ID NO: 24207 - protein, 61 aa, Artificial Sequence
  Synthetic
SIEEELKKVLKEIEDRVRKSDKENKEASERIKRTVEELERRLREVLRRIEEAVRKLVREKG

SEQ ID NO: 24208 - protein, 59 aa, Artificial Sequence
  Synthetic
EKKVKEVVDELRKLLRELEKLSEESNRKLKKLTDDIEKLVRDVEKELRKLLKELAEKIK

SEQ ID NO: 24209 - protein, 60 aa, Artificial Sequence
  Synthetic
SVEERLKRVLERAREEIKRLLDELERVLEESRKEIKKLSEDLTRANEDTRREIEKLAREI

SEQ ID NO: 24210 - protein, 59 aa, Artificial Sequence
  Synthetic
ERIVKKVEEEIEELVRRVEKRVREVKKRMEDSNREVRKANEEVKKRSEDLLRKVRRDAE

SEQ ID NO: 24211 - protein, 60 aa, Artificial Sequence
  Synthetic
RVRDELREVLRKAREDIKRLSDKMREVLRESEEKIKRLSDDLRRVNEETKKEIDRLRKEI

SEQ ID NO: 24212 - protein, 59 aa, Artificial Sequence
  Synthetic
KEIFRKVEKEIEDLLEEVRDVNRKIEEEARRSNEDVERVNREIKKRSEELLRDVEKKTE

SEQ ID NO: 24213 - protein, 60 aa, Artificial Sequence
  Synthetic
SVREELKKALDRVRESIRRLSEELREVLERSEDTIRRLVEDLERVNEETRREIEDLARKI

SEQ ID NO: 24214 - protein, 59 aa, Artificial Sequence
  Synthetic
ERIMKEIEKRIEDLEREVKEVNREVIERAEESNRRVEELVREAKKRSRELLKRVREEAK

SEQ ID NO: 24215 - protein, 60 aa, Artificial Sequence
  Synthetic
SVREDLERALRRAAEEIEKLSRDLKRVLEESRKNIERLRRDIERMNEETEKEIRRLAREI

SEQ ID NO: 24216 - protein, 59 aa, Artificial Sequence
  Synthetic
EEDAEEIKTRIKELIDRVRRVNEEVKERMKKSNEEVEEVVRRVKEESKRLLERVEEDVR

SEQ ID NO: 24217 - protein, 60 aa, Artificial Sequence
  Synthetic
SLREDLRRVLERARDELRKLSKELKEVLKRSRDNIRKLSEDVKRANERTEEEIRRLTKEI

SEQ ID NO: 24218 - protein, 59 aa, Artificial Sequence
  Synthetic
DEIFKRVKKEIKELVDRVREVNKDVIRRMKKSNDEVKRENEKVIRESEKLLKDVEDARR

SEQ ID NO: 24219 - protein, 60 aa, Artificial Sequence
  Synthetic
SVRERLEKVLKEVEDSIKELSDDLRRVNKRTEEEIRRLAEDLERVLERIEREIRKLAKEI

SEQ ID NO: 24220 - protein, 59 aa, Artificial Sequence
  Synthetic
EEIAERVERTIRKLEDDVRKVNEDVKRRSRELLERVARLVERVKEEAEKLLEDVKRKAD

SEQ ID NO: 24221 - protein, 60 aa, Artificial Sequence
  Synthetic
SLREDLERVLEEIERELKELSDDLRRMNEETEREIRKLSDDLRRALEKIRDEIRKLAEEI

SEQ ID NO: 24222 - protein, 59 aa, Artificial Sequence
  Synthetic
EEIFRKVKEEARRLVREVEEVNKEVKKRSRDLLREVRKVNEDVKREIERLLRKVAKDAE

SEQ ID NO: 24223 - protein, 60 aa, Artificial Sequence
  Synthetic
SMREDLRRVLEEAEKKIRKLSKEAKDANRETEKEIRKLSEDVKRVNKESKDEIDRLAEEI

SEQ ID NO: 24224 - protein, 59 aa, Artificial Sequence
  Synthetic
KEIAEKVKREIEKLVRDVERVNREIIERSEKLLREVREENERVKRESRRLLKEVEKAAE

SEQ ID NO: 24225 - protein, 60 aa, Artificial Sequence
  Synthetic
SVRETLKKVLEDVRRELKKLSDKLRKVLEDSRRNVKRASDKLREVLKRVKEEIERLRREI

SEQ ID NO: 24226 - protein, 59 aa, Artificial Sequence
  Synthetic
EEIAKRIIEEIKKLLDRVREVNEDVIRRMKKSNEDLDRRNEEVRKRIEDLLEKVARDAK

SEQ ID NO: 24227 - protein, 60 aa, Artificial Sequence
  Synthetic
SLEETAKEVIERSEDHLRRLEETNRKVVEDSERHLDDLTRRIKKVVEDIKKRLDEIEKRG

SEQ ID NO: 24228 - protein, 60 aa, Artificial Sequence
  Synthetic
AEELLRTVVKEIEDANRRVEEVSRKNTEDIKEWNKRLEEELRRVVERARRELKKVEDAAR

SEQ ID NO: 24229 - protein, 59 aa, Artificial Sequence
  Synthetic
SLEETAKRVIEESRKHLDRLRRENERVVKEIRDALRELEKKVEDVVRRIAEELERIRKE

SEQ ID NO: 24230 - protein, 62 aa, Artificial Sequence
  Synthetic
EEAEDLLRKVIEDIKELNRELERVSRKNIEDLRRWLEEVREMVKRVEEKAKRVLEELREAAK

SEQ ID NO: 24231 - protein, 60 aa, Artificial Sequence
  Synthetic
SLEETIEKVVERSKRNLEKLRREIRKVVKESDENLKDVERRAREVVEEIKKALEDIRRKG

SEQ ID NO: 24232 - protein, 62 aa, Artificial Sequence
  Synthetic
EEAEELLRKVIKESEDLNRRLREEVKKVVREIEEANKRVNDTVRKMEEALKKLLDDLREKAR

SEQ ID NO: 24233 - protein, 60 aa, Artificial Sequence
  Synthetic
SLEEDMKRVVDESRRNLERVEKENRDVVKESRDNLKKVEDDIRKVVKDIRDELEKIRKRG

SEQ ID NO: 24234 - protein, 62 aa, Artificial Sequence
  Synthetic
EEAEELVRRVKETSKRVNEELDKTAKKNVDDIKDWNRRVNEKVKKVKEDAERVLRELEETAR

SEQ ID NO: 24235 - protein, 59 aa, Artificial Sequence
  Synthetic
SLEETITKVVEESKKNIDRLLEEVRKVVEDSRRDLDRVIDEARKVVEKIDRELKRIEKR

SEQ ID NO: 24236 - protein, 62 aa, Artificial Sequence
  Synthetic
EEAEELVRRVKKRSEDVNKKLDEDVEEMKRRSEKLNKDINKDVDRVRKRLEEVLKRLREAAK

SEQ ID NO: 24237 - protein, 60 aa, Artificial Sequence
  Synthetic
SLKDEIKKVVDDSRRNLEEVKKEITRVVKESRERLEELERDIERLVEKVTRELDRIEEEG

SEQ ID NO: 24238 - protein, 62 aa, Artificial Sequence
  Synthetic
EEAKELVEEVIRRSREVNRDLNRRVREVEKESRDANERVKRRVEEVKRRAREVLERLKKAAE

SEQ ID NO: 24239 - protein, 60 aa, Artificial Sequence
  Synthetic
SLEEDAKRMVDTNEDRVREWERKIDKVVKDSEKRLRELREDAERMVREIKKELEKIRTEG

SEQ ID NO: 24240 - protein, 60 aa, Artificial Sequence
  Synthetic
AEELVRRLKKASEDSNEKVARLIEEVIKRSKDVNDDLERDLREVKKRLKDVLKRLKEKAK

SEQ ID NO: 24241 - protein, 60 aa, Artificial Sequence
  Synthetic
SLEEDAKRAVEESKRTLRELEEENKKVVEDIRRALRRLEEDIKRVVEEIRRELDRIRREG

SEQ ID NO: 24242 - protein, 60 aa, Artificial Sequence
  Synthetic
AEELVRRVKKTIEDVNRKVAKVVKENIKRLREWLKRVEERLKEVKDRLRKVLEDVERAAK

SEQ ID NO: 24243 - protein, 59 aa, Artificial Sequence
  Synthetic
DVEEDVKRVADDNRRELERWRRDVKKVADEVKDRSRKLERDVERRIREIEKTLEDLRRE

SEQ ID NO: 24244 - protein, 59 aa, Artificial Sequence
  Synthetic
KEVVKRLKEESKKSNEDVARRVEKLKEELERSTREVERAVRELKKELDEVVREVKERAK

SEQ ID NO: 24245 - protein, 60 aa, Artificial Sequence
  Synthetic
SIEERLDKLLRDVKRALEELEERIRRSNKRLREAVEKLKKEVEDSNRELDKAVKEVLRRK

SEQ ID NO: 24246 - protein, 59 aa, Artificial Sequence
  Synthetic
EEAVRTAADLLRRVLERVKRLAEELHRHNKEVLDEARKIARDLHRLNEEVLRRVEEATK

SEQ ID NO: 24247 - protein, 60 aa, Artificial Sequence
  Synthetic
SIEEDLKRLLDEVRKRSKDLKEEVKRSNDRVREDLKRLKEEIDRLLEEARRRLEEIIRRK

SEQ ID NO: 24248 - protein, 59 aa, Artificial Sequence
  Synthetic
KELVDRARDKIRESLRRSEKIIEELHEHNKDALRRVREEIKRLKDKLKKVVEEVERATR

SEQ ID NO: 24249 - protein, 57 aa, Artificial Sequence
  Synthetic
DSVERVKEESERTNREIAKLSKKVEDETRKVLKDLEDISRDTERRSREVLERARRDK

SEQ ID NO: 24250 - protein, 58 aa, Artificial Sequence
  Synthetic
ELVRELEEVVRENEERVRRLIERNKKLVDDARKRVEELVRRNDKIVKEIEKVVRDIKT

SEQ ID NO: 24251 - protein, 57 aa, Artificial Sequence
  Synthetic
KSDEEVEKLIREVLKRIEELSREAEKLTDEVRKLLKEISDRVEERSRDVLDKIRRTN

SEQ ID NO: 24252 - protein, 58 aa, Artificial Sequence
  Synthetic
ELVRKLEKLLEDAERRVRELVKRNKEVVERVKRTVDELKARNKKIVEEIKKVMEEITR

SEQ ID NO: 24253 - protein, 57 aa, Artificial Sequence
  Synthetic
RELEEVEKKVRTVLEEVRRISEKAEELSRRVLEEARKISEDNEREVRRVVEDVRREN

SEQ ID NO: 24254 - protein, 58 aa, Artificial Sequence
  Synthetic
DLVERLKELVKKVEDEVRRLVKRNKDIVDDIRRRVEELVRRNKRITDEVRKEADKLRR

SEQ ID NO: 24255 - protein, 60 aa, Artificial Sequence
  Synthetic
SELEKVKKEIRELLEEVRKISKESEDRSRKSNDELHKSSEEVEKRIRDLLRELEKIVREL

SEQ ID NO: 24256 - protein, 59 aa, Artificial Sequence
  Synthetic
KDVVKELREVLERAEREARKLIKRNDEILKESEKNARDLIRRTEELLRRAKKRVDELKK

SEQ ID NO: 24257 - protein, 60 aa, Artificial Sequence
  Synthetic
SDVEEVKKEIARLLEELKRTTDKVKEDSDRSNEEVHRSSEKVKKDIEKLLDELRKVVEEL

SEQ ID NO: 24258 - protein, 59 aa, Artificial Sequence
  Synthetic
REVVKELEDVLKRAEEVVERLEEKTRRILEESRKNIERLKRETEEMLKRAEDEVKKLKD

SEQ ID NO: 24259 - protein, 60 aa, Artificial Sequence
  Synthetic
SLVDRVRELIERLLRRLEEIVREVEERLRRSNERLHESSADVERLIRELLERLRDIVRKL

SEQ ID NO: 24260 - protein, 59 aa, Artificial Sequence
  Synthetic
EDVVRELEELLRRAKERVDELKKRLEELLKESREDVERLKKKTDEALKRAEEEVEKLRK

SEQ ID NO: 24261 - protein, 61 aa, Artificial Sequence
  Synthetic
RDLEEVKKRIDELLKRVRETTKRVEDELRRSNKELHESSRRVEEEIKKLLEELEDVFRKVK

SEQ ID NO: 24262 - protein, 59 aa, Artificial Sequence
  Synthetic
EELVRTLEDMLRRAREEIEKLKEKTRKLLEDSERDVKRLIERTTEVLKRARERVEELKK

SEQ ID NO: 24263 - protein, 61 aa, Artificial Sequence
  Synthetic
SELEEVKKRIDDLLKRLRDIVDTVRKELRKSDKELHDSSKRVEEEIKKLLEELRRIVETLK

SEQ ID NO: 24264 - protein, 59 aa, Artificial Sequence
  Synthetic
REVVETLRRVLKRAEDDVRRLLEELRELLERSKRNVERLIERTKELLKRAEDEVKKLED

SEQ ID NO: 24265 - protein, 61 aa, Artificial Sequence
  Synthetic
SLLEKVEEEVRRLLKRLRDIVEEVRRLLEESNERAHRSSKKVKEDIDELLKELEDVVRRVK

SEQ ID NO: 24266 - protein, 59 aa, Artificial Sequence
  Synthetic
KDLVKTLEDILERAEREVKKLEDRLRKLLEDSKRNAEELIKRTEDVLEEALRRVEELKK

SEQ ID NO: 24267 - protein, 59 aa, Artificial Sequence
  Synthetic
SEAERVREILKDAEKKIRDILRRLREINRESARRIEDIKRKLDEILKRNEDDVRRLEKD

SEQ ID NO: 24268 - protein, 56 aa, Artificial Sequence
  Synthetic
VEDAERTVRELIKRVEEALERAERASRELIKTVEKVLEEVERRNRKSNEELKEATR

SEQ ID NO: 24269 - protein, 60 aa, Artificial Sequence
  Synthetic
SLEEEAKELVKRVRDELRKIERTIEKIVEDSRRRLEENRKRNKELIERVEKELRELKKRV

SEQ ID NO: 24270 - protein, 60 aa, Artificial Sequence
  Synthetic
ARDILREAKKMLEKVLRDLRRVLEELRKENEKVLRELEEISKETEDRLREVLRELRERTR

SEQ ID NO: 24271 - protein, 57 aa, Artificial Sequence
  Synthetic
SVEDEVREVAKKIRRILEKLKRELDRHSKKIEDILEEIRDKNEKAKEEIEEVLRRRL

SEQ ID NO: 24272 - protein, 59 aa, Artificial Sequence
  Synthetic
KEDVERVKRELEKVLRELAEEVRESLERVSEVAERLKRENDEVNDRLKKMLEDLLRKAT

SEQ ID NO: 24273 - protein, 56 aa, Artificial Sequence
  Synthetic
DEVEEVIRRVEESNKRVNEENDRVVRESKEIVRKVEEDNRRAIKESEEMLDRVAKD

SEQ ID NO: 24274 - protein, 56 aa, Artificial Sequence
  Synthetic
EEDLRRVVDKSRKNVEEVERKNRDVLRRIDKRAKELEDRNREVLKKIEKTIRDLEK

SEQ ID NO: 24275 - protein, 56 aa, Artificial Sequence
  Synthetic
SEVDEVIRRVEKSNKDVNDENKRVIDRSKELNREVNERNKEAIKRSRDLADEVRRD

SEQ ID NO: 24276 - protein, 56 aa, Artificial Sequence
  Synthetic
EERLREVVKRSEDNVRKVEEDNRRVLEESTRNVKEVKERNEKVLEEIRKTLEDLER

SEQ ID NO: 24277 - protein, 56 aa, Artificial Sequence
  Synthetic
SEVDKVRKELEDMAREIEKRAEDVIREIKRSNEEVNRTNEKVIRDSERMLEKAERD

SEQ ID NO: 24278 - protein, 56 aa, Artificial Sequence
  Synthetic
EERLDRVREKLERIVREIEDRLRKVLEDSRRNVEEVRRRNEEAVKKIRRILEELER

SEQ ID NO: 24279 - protein, 56 aa, Artificial Sequence
  Synthetic
DEVDDVIRDVDRTNEEVERENRRVIEEVRKSNEEVNKKNADAEKRSREMAERAAED

SEQ ID NO: 24280 - protein, 56 aa, Artificial Sequence
  Synthetic
KEKLDRVLERSKKTVEELEKRNREALDRSRRNVEEVEKRNREVVKEIAERVRRLKK

SEQ ID NO: 24281 - protein, 56 aa, Artificial Sequence
  Synthetic
SEVDKVVEDVKRMLKEVEDRNEKVIRDVEKMLREVEEKNKRVIEDSERVAKEAADD

SEQ ID NO: 24282 - protein, 56 aa, Artificial Sequence
  Synthetic
KEKLDKVLEEIREIVKRLEDRNREALRRIKEIVDRLEKRNRKVVEDVERIVREIER

SEQ ID NO: 24283 - protein, 56 aa, Artificial Sequence
  Synthetic
SEVDEVIKRIEETNRRVEEMNKDAIRRVKESNKRVEERNKEVIERSKKLIDDVRRD

SEQ ID NO: 24284 - protein, 56 aa, Artificial Sequence
  Synthetic
EERLRKVLKDSERTVKELEKRNRRVLEESDKEVKRLEKENRDVVDEIRERAKEIER

SEQ ID NO: 24285 - protein, 56 aa, Artificial Sequence
  Synthetic
SEVDKVITELEKMLRRVKEENKRVIDESRRALEEVEKRNREVIERSDEMARRAAED

SEQ ID NO: 24286 - protein, 56 aa, Artificial Sequence
  Synthetic
EERLREVLERIARRVRELEERNKKVVKEIEERVRELERRNREVVKKIEEKVKRLET

SEQ ID NO: 24287 - protein, 56 aa, Artificial Sequence
  Synthetic
DEVRKVIKELRDELRRVEELNKEVIDRSRKLVEDIARESKEVIERSRKLLDDVRKD

SEQ ID NO: 24288 - protein, 56 aa, Artificial Sequence
  Synthetic
REDLERALKEIEETIRRLEKRNRDVLKEIEDEARRLEEENRKVLKEARKIVEDIKT

SEQ ID NO: 24289 - protein, 56 aa, Artificial Sequence
  Synthetic
SEVDDVTRKLERILEELTETSERVVRTSRRVAEELEKRSKEAVERSRKLAEEVARD

SEQ ID NO: 24290 - protein, 56 aa, Artificial Sequence
  Synthetic
REKLERVLEEIRRRIEELSEKNRKVVKDIREIVRKLTERDEKVVREIKKIVDDIET

SEQ ID NO: 24291 - protein, 56 aa, Artificial Sequence
  Synthetic
SEVDEVTREVEELIREVEKLSEDVIRTSKELAKRAEKLSREVIKRSEELIDEVRRD

SEQ ID NO: 24292 - protein, 56 aa, Artificial Sequence
  Synthetic
KKKLEDVLREIAKKVREIEERDRKVVEEIREILKRLEDENREVLKKIRRIAEEIRR

SEQ ID NO: 24293 - protein, 56 aa, Artificial Sequence
  Synthetic
DEVRKVIKELEDRLREVEKKSKDAIDTSREMLKRVDDENKDVKRRAEEILKRVDED

SEQ ID NO: 24294 - protein, 56 aa, Artificial Sequence
  Synthetic
EEELRKLLEDIREKVERIVKRDEDVVREIEEEARRLADENRKVLEEIERIIRELER

SEQ ID NO: 24295 - protein, 56 aa, Artificial Sequence
  Synthetic
REVDEVTRRIKELNDELERRVRRAKERIEELNKRVNREDEEIVDRVRKLNDELAKD

SEQ ID NO: 24296 - protein, 59 aa, Artificial Sequence
  Synthetic
EDVKRKLKEVVDESRRTVDEIRRELERVVEKSRKNIEEVKKHTREVLKRSEETARELKK

SEQ ID NO: 24297 - protein, 56 aa, Artificial Sequence
  Synthetic
SEVDRVLEEIRKLNEDLNRRVDDATRKIRDLNRKLNEDVKKVTEDIKKLNEDLRKD

SEQ ID NO: 24298 - protein, 59 aa, Artificial Sequence
  Synthetic
EEVKRKLEKLVRESERNVREVKKKLDEVRKESKTNADKVREELKRVVEESERTVRELEK

SEQ ID NO: 24299 - protein, 56 aa, Artificial Sequence
  Synthetic
SEVDEVEKDIERLLEELRERVKRVTDEIRKLNKELNETDTDIVRKIRELLERLERD

SEQ ID NO: 24300 - protein, 59 aa, Artificial Sequence
  Synthetic
EEVKRRLEEVLRKVKRELDRIRDELRRVVEESETNVRDVRRHTEEVVKEVEDEVRRLEK

SEQ ID NO: 24301 - protein, 56 aa, Artificial Sequence
  Synthetic
SEVEELERRIRELLRRVKRIDEEIVRRIRELNKELNRRDERIVETVRELVERVARD

SEQ ID NO: 24302 - protein, 59 aa, Artificial Sequence
  Synthetic
EEVKKRLEDVLRRVREEIERLKKHTDDVLRESEKNAEDVKKHTDDVVREIEERIRELKK

SEQ ID NO: 24303 - protein, 56 aa, Artificial Sequence
  Synthetic
SEVEEVIKEIEKLNEDVNRIDKEIVKRIRDLNREVNERDKEIVKEIKRLVEEVRKD

SEQ ID NO: 24304 - protein, 59 aa, Artificial Sequence
  Synthetic
EEVKDRLRKVLESSSDNVRRVTEHTDKVLEESRKNIEDVKKHTDEVVKEIEKEVRELKK

SEQ ID NO: 24305 - protein, 56 aa, Artificial Sequence
  Synthetic
DEVKEVIRRAEKLNEKINDILRRVEEEIRRTLDEVRRRDEKIVKEIRDLMRELSED

SEQ ID NO: 24306 - protein, 59 aa, Artificial Sequence
  Synthetic
EEVKRELEEVVKESEKNIREVTDRLRKVLEESTKIVEELEEHTKRVVDEIRKRADELRR

SEQ ID NO: 24307 - protein, 60 aa, Artificial Sequence
  Synthetic
SLEEEIDRVLDEIRRIIEEIKKHTTEVLEESKRNIEEVKKHTDEVNEKSRRDIEKIKREV

SEQ ID NO: 24308 - protein, 59 aa, Artificial Sequence
  Synthetic
KEKVRKVIEEIKKIAEDVARRDKEMVDRSREINKKVNEEDKKIVEDSKRIIEDVKRKTD

SEQ ID NO: 24309 - protein, 60 aa, Artificial Sequence
  Synthetic
SLEKEIKDALDRIKKDIEDSARRTKEVNDKSKEIIDRLKKHTDDVNDESRRRIKEIKDEV

SEQ ID NO: 24310 - protein, 59 aa, Artificial Sequence
  Synthetic
KRLVKEVIDRLDEIVEDVKRRDEEIIRTSEKLLRDVARLDEEIAKRSRDLLRDVERKVK

SEQ ID NO: 24311 - protein, 60 aa, Artificial Sequence
  Synthetic
SLEERLKKVLKEVDERIREIKKHTDKVNEESRDKIRKLKEELDRVNRESEEEARKIKSEV

SEQ ID NO: 24312 - protein, 59 aa, Artificial Sequence
  Synthetic
DKDVRDVEEEIRKLLDEVRKLDEEMVERSKKLARTVERLVKEVIRESKEIIRKVKEETD

SEQ ID NO: 24313 - protein, 60 aa, Artificial Sequence
  Synthetic
SLEEEIERVLRKVEKEIRKIKERLDEMLKEIRERIERSKRRTDKVNEDSRRRIEEIKRRV

SEQ ID NO: 24314 - protein, 59 aa, Artificial Sequence
  Synthetic
KEDVKKVKKDIDKLLKEVREEVKEAEDRIRRIAEEVDKEDKRMIETSRRIIRKVDEDVR

SEQ ID NO: 24315 - protein, 60 aa, Artificial Sequence
  Synthetic
RIEDKLRKVLEEVERIIREIRKRLEDANDDSRREIEESKEDTDRVLEEIRRRIEEIKREV

SEQ ID NO: 24316 - protein, 59 aa, Artificial Sequence
  Synthetic
DEDVERVLRKIKELLRRVEEEVERVIRESKKLLDEVRKEDEEIKKTLRDIVREVARKVK

SEQ ID NO: 24317 - protein, 60 aa, Artificial Sequence
  Synthetic
SLEETVEKALKDSKDNIKRLKERVDRVLEESRRTIEELRDRARRVREEVKKRLDELRRRG

SEQ ID NO: 24318 - protein, 59 aa, Artificial Sequence
  Synthetic
KDAVKKLIDDVRKINKELNDTVEKLARDVEEINKEVARRVEKLVRELEKIDEDVTRREK

SEQ ID NO: 24319 - protein, 59 aa, Artificial Sequence
  Synthetic
SLEEKVREVLKRSEDNIRKLEDESRKVLEDSERNLRKLKKEVDDAADRVRRKIKELRER

SEQ ID NO: 24320 - protein, 59 aa, Artificial Sequence
  Synthetic
ARIVDKLIREVEKINRDVNEKVRTSIEDLKRINEELNERVERLIREVERILKEVEDRAR

SEQ ID NO: 24321 - protein, 60 aa, Artificial Sequence
  Synthetic
SLDERVERALEKSEENLRRLKKRSEEVLEEVKEAIKELKRRSREALEDVRRVLDELRKDG

SEQ ID NO: 24322 - protein, 59 aa, Artificial Sequence
  Synthetic
AKVVEELIKRVEEINTRLNEKVKKSIDDVRRIIEEVRRRVEKTIRDVERIKEEVERRRR

SEQ ID NO: 24323 - protein, 60 aa, Artificial Sequence
  Synthetic
RLEDEVRKMEKEVREEVKRLEDESRKVLEESRRNLDKLREESKRVLDTVRERIKDLRRRG

SEQ ID NO: 24324 - protein, 59 aa, Artificial Sequence
  Synthetic
AKVVKELIDRVRKILEDVEREVKKSIEEVKEINRRLNEEVKKTIEEVKEIVKEVTERAK

SEQ ID NO: 24325 - protein, 60 aa, Artificial Sequence
  Synthetic
SLEDEVRDMDRKVDEALKRLRDESKKVHDDNKREIDKLRKESEDVHRENKETLDRLRERG

SEQ ID NO: 24326 - protein, 59 aa, Artificial Sequence
  Synthetic
KDAVRELKRDVERIIKEVDELVKRSIEESRRITEEVARRVKETIDRSRKITKELRDRAD

SEQ ID NO: 24327 - protein, 60 aa, Artificial Sequence
  Synthetic
SEIEELEERLERSTRDVEKKVRDTIRESERSTEEVARRVDESIKRLERVVEEVEERVRRI

SEQ ID NO: 24328 - protein, 59 aa, Artificial Sequence
  Synthetic
EEIRKRVEDVAKKVKEDTDKLRDDSRKVHERNEEESRRLEEKSERVLRRVEEILKEIER

SEQ ID NO: 24329 - protein, 60 aa, Artificial Sequence
  Synthetic
SEVDRLITELRRSTKRVEEEVRRLIEDSKRSTREVAERVKESIRRVEKVVEEVKRRVDRI

SEQ ID NO: 24330 - protein, 59 aa, Artificial Sequence
  Synthetic
EDIRRKIEEVVKEVKEETDRLREEAEKVVRENRKASEKLRRESEEVVERVKKKVDDTET

SEQ ID NO: 24331 - protein, 60 aa, Artificial Sequence
  Synthetic
REVEEIIKELRKSTTDVAETVERLIKRSRESTKEVADRVKRLIDEVRRVVEDVERKVRRI

SEQ ID NO: 24332 - protein, 59 aa, Artificial Sequence
  Synthetic
ERIEKEIEDVVREMEERTKRLEKRAEEVNEENKRRSDELRKRIKKAVDEVEKRLDEIRN

SEQ ID NO: 24333 - protein, 60 aa, Artificial Sequence
  Synthetic
SEVEDLIKKLEESTEEVDRRVKKLIEDSRRSTEDVDRKVKELIKDVRRVIREVEERVARI

SEQ ID NO: 24334 - protein, 59 aa, Artificial Sequence
  Synthetic
DRIRETVERVFRKVERKTRELREEIREVDERNRRDSKRLRDEVERVARELEKKLKEIDE

SEQ ID NO: 24335 - protein, 60 aa, Artificial Sequence
  Synthetic
EEVERLIRELEESTDRVAREVERLIRESRKSTEDVRRKVDKLLREVREAIKEVEERVRRT

SEQ ID NO: 24336 - protein, 59 aa, Artificial Sequence
  Synthetic
EEIKRKIDKVVEEVRRRTEELRERIERVNEENKEASERLERKLREMAKELDKKLKDIRR

SEQ ID NO: 24337 - protein, 60 aa, Artificial Sequence
  Synthetic
KDVDELITRLEESTKRVAEEVKRLIEESRRSTERVAREVRRSIEEVKRVIREVEEKVRRI

SEQ ID NO: 24338 - protein, 59 aa, Artificial Sequence
  Synthetic
KDIERKIREVVEKVERDTRRLEEEAKKVNEENEKASRDLEKESKDAADTLEKKLRDIER

SEQ ID NO: 24339 - protein, 60 aa, Artificial Sequence
  Synthetic
DEVEDLIRRLEESTKDVAKKVDDTIDESRKSTKDVAEAVKRSIDEVRRVVREVEERVRRI

SEQ ID NO: 24340 - protein, 59 aa, Artificial Sequence
  Synthetic
DRIRDEIRKVVERAKERTKELEDKSKEVNDRNRETSERLKKESEDVVREVKKELDRIRK

SEQ ID NO: 24341 - protein, 60 aa, Artificial Sequence
  Synthetic
SEIDKVETEVKKLDKELEELVKRSSEKTEKLDRELEKLLRDVVREVEKLLKEIEDLVRRR

SEQ ID NO: 24342 - protein, 59 aa, Artificial Sequence
  Synthetic
KELAERIKKVARESEETVRRLEERLERDSERSRETLRRLAEAVRRVIEKVKEILERLRT

SEQ ID NO: 24343 - protein, 60 aa, Artificial Sequence
  Synthetic
DKMEEVRRTVEKLLEDLNRLSEEVIRTSEKLLEELRRLSEEVERDTERLLKELEKMKRDG

SEQ ID NO: 24344 - protein, 56 aa, Artificial Sequence
  Synthetic
DEDIKRVLDEVKKILDDNREKNKRALDRVREEVKRLEDRNREVVRKVRKIVEDLRR

SEQ ID NO: 24345 - protein, 60 aa, Artificial Sequence
  Synthetic
RVDERLDTVLKRVEETVRENKKKNDELLERSKENIDRLKKRLDDLLDKVRREAEKLKREV

SEQ ID NO: 24346 - protein, 59 aa, Artificial Sequence
  Synthetic
EEVVKEVEERIKKLLKEVNDTSKDAERRLRETNERLNEIVKEVEKRIRELSEEVRKRVK

SEQ ID NO: 24347 - protein, 60 aa, Artificial Sequence
  Synthetic
SVDERLDEVLERVKEDMDRNRRKNDESLREDEENVRRNKKETDESVKRVEERVRELKKRV

SEQ ID NO: 24348 - protein, 59 aa, Artificial Sequence
  Synthetic
EEVVKTVEEDIKRLLKEVNKVSDEAHKRNKELNERVNRVNKEAHKRNEDLLREAERKVR

SEQ ID NO: 24349 - protein, 60 aa, Artificial Sequence
  Synthetic
DVKERLDKVLEEVKRDIERNKRRNDKLLKESKRIVEENKKKNEKSLEEVKRKADDLRTKV

SEQ ID NO: 24350 - protein, 59 aa, Artificial Sequence
  Synthetic
KEVVEKVEREIERLREEVNRVSKKAEEDVERTNRELNRVSDEAHKTNERLLEKVERDVK

SEQ ID NO: 24351 - protein, 56 aa, Artificial Sequence
  Synthetic
SSEDKARELVRTLEEALRELEREMRKVVEDSKKTLKELEERNRRLEEELEKVLERV

SEQ ID NO: 24352 - protein, 55 aa, Artificial Sequence
  Synthetic
DRVIEELKELLERLRERVERVIKKVKDLNEELRRRNDKVAKDLKRLLKELEDRTR

SEQ ID NO: 24353 - protein, 58 aa, Artificial Sequence
  Synthetic
SIEDEIRKVLTRLRRVLEEIKRSSKEVADELKRVLEEIKRSSEENNKEVEEVLKEIEK

SEQ ID NO: 24354 - protein, 58 aa, Artificial Sequence
  Synthetic
REVREVIERLERMLEELERHNRDVERDLRRVLEEAKRHNEESLRRSKELLKKVRDEIE

SEQ ID NO: 24355 - protein, 59 aa, Artificial Sequence
  Synthetic
SIEDEIRKLKEDIKRVLDKVRRDNERLKERLDKVLEDIRRSSEDNNRKLEEVLKRIRDK

SEQ ID NO: 24356 - protein, 59 aa, Artificial Sequence
  Synthetic
EERVREVIEKLKETLERLKREDKEVADRAEKLLREAEEHNKRSLDESRRVLEELDEEIR

SEQ ID NO: 24357 - protein, 59 aa, Artificial Sequence
  Synthetic
SIEDRVRRVLEELEEVLERIKDSSRRVVEEAEDVLRKLEEENRKLERDLERVLKEIEEE

SEQ ID NO: 24358 - protein, 59 aa, Artificial Sequence
  Synthetic
ERELEEVEKRLREVLRRLEKHNEDVIRDLRRLLEEAADEDRRVIKTLRDVLRELKKRIK

SEQ ID NO: 24359 - protein, 59 aa, Artificial Sequence
  Synthetic
KIEEKIRRLEEDLDRVLDEIRRNSERVTKEAEEVLERLKRENEKLKKRLEEVLEEIRRR

SEQ ID NO: 24360 - protein, 59 aa, Artificial Sequence
  Synthetic
ERRVDKVIEDLKRVLDEARRHNEDVVRKLKEALDKLREDDDRVRRDLEKKLRDLERRIE

SEQ ID NO: 24361 - protein, 59 aa, Artificial Sequence
  Synthetic
SIREKIRELEERLEEVLRRIEENSERVLREAERVLKEIKDNSKRNNEKLERALEEIRKL

SEQ ID NO: 24362 - protein, 59 aa, Artificial Sequence
  Synthetic
EREVDRVIRKLEDVLRKLEEHNRRVVERLKRLLEELKKHNEDSLRKSEEVLRKLEEDAR

SEQ ID NO: 24363 - protein, 59 aa, Artificial Sequence
  Synthetic
SIEERVRELMRDLERVLKEIREHSKRVIEEAKRVLEEIERNSERNNKELEEVLDEIRKR

SEQ ID NO: 24364 - protein, 59 aa, Artificial Sequence
  Synthetic
EKELEEVERRLRKVLEDLRRNNKEVVDRLKEVLERLKEHNRRSLDESRKVLRELKERIR

SEQ ID NO: 24365 - protein, 59 aa, Artificial Sequence
  Synthetic
SIEDRIRELEKRLEKVLREIEEHSKKVVREAEKVLREIEENSRRNNKRLEEVLDEIRKR

SEQ ID NO: 24366 - protein, 59 aa, Artificial Sequence
  Synthetic
EEDVRKVIRDLEDALRRLKEDNEDVVRRLKEVLKELRKHNKRSLDESEKVLRELRERIR

SEQ ID NO: 24367 - protein, 58 aa, Artificial Sequence
  Synthetic
SIEDEVRKLAKDLDDVLREIEENSKRVLEKLDEMLERIREHSERVVERAKRVLDEIRK

SEQ ID NO: 24368 - protein, 59 aa, Artificial Sequence
  Synthetic
ERELRTVIRKLKEVLDRLREHNKRVVEELEEALKELEKDNRKVVEDLERMLEELKREVN

SEQ ID NO: 24369 - protein, 58 aa, Artificial Sequence
  Synthetic
SIEEEIEKVKKRLEDVLREIKKHSEEVKKKAEDVLRKIEKHSRDNNRKAEEVLKDIAR

SEQ ID NO: 24370 - protein, 59 aa, Artificial Sequence
  Synthetic
EEEVRKVIEELEELLERLRRNNEEVVRDLERVLEELKRDNEKSVEDSERLLTELKREIE

SEQ ID NO: 24371 - protein, 61 aa, Artificial Sequence
  Synthetic
SVKEELDDLERKVDEDVRRIRRELDEVLKESRENVKRSKDHLDEVLRRVEEAVKRLIRERG

SEQ ID NO: 24372 - protein, 59 aa, Artificial Sequence
  Synthetic
KEKVDRAKKEIEDLLREVRKRVEDVAREIKRLNEDVNRINDKVTREIEKLLEDVDRKVK

SEQ ID NO: 24373 - protein, 61 aa, Artificial Sequence
  Synthetic
SVEDKLRELEKRVRDVHRKNEEDLDRLLRKSHEMHKRNEDELRKVLEEVRDAVRKLLKEKG

SEQ ID NO: 24374 - protein, 59 aa, Artificial Sequence
  Synthetic
DEEVERVIKRIDDLLKEVHKILREVIRRIEKSLEEVHKRVRDLVREIKELLKEVDRKAK

SEQ ID NO: 24375 - protein, 60 aa, Artificial Sequence
  Synthetic
SLEDKVRELERKSRENIKRNEEELRRAKRESEENIKRNEEELKRNKERSDRMIEKIRRET

SEQ ID NO: 24376 - protein, 59 aa, Artificial Sequence
  Synthetic
KDVVERLREALEDANRRVNERNRELIKRLKEANKKVNEENEDLLRESEEILRRVEEEVR

SEQ ID NO: 24377 - protein, 60 aa, Artificial Sequence
  Synthetic
SIEELVKDAKRRSKENADRNREKLRKVEDDSRRNIEENERRLEENEKRSREVIKELADRT

SEQ ID NO: 24378 - protein, 59 aa, Artificial Sequence
  Synthetic
EDVVEKLIRELEEINREVNKRNDDLIRELREINKKVNEENKRLMKESDDILKEVRERVR

SEQ ID NO: 24379 - protein, 60 aa, Artificial Sequence
  Synthetic
SIEDLVRELKKKVDEVAEDLRRKVREALERSRENIDRLKKHSEENLRRSEEVVDKLRKET

SEQ ID NO: 24380 - protein, 59 aa, Artificial Sequence
  Synthetic
DKVVKKLIKEVDDILREVTKLVEKLIRELEDINRKVNERNRRLAEESRKILDEVEKRVR

SEQ ID NO: 24381 - protein, 60 aa, Artificial Sequence
  Synthetic
SLDEKVEELRREVDEAIKDIKEKVKRANEESERNIRELEERVKRNLEKSKKAIEELARRV

SEQ ID NO: 24382 - protein, 59 aa, Artificial Sequence
  Synthetic
EKVVEKLRKEVKEVLKEVEDRVRKLIREVERINEEVNRRVKELLEESEKILDDVDKRVK

SEQ ID NO: 24383 - protein, 59 aa, Artificial Sequence
  Synthetic
EVEERVKELEKEVEEVLKESEDHVRKSEEDLRRALEESRKHIEDLERKLKKVLEELERK

SEQ ID NO: 24384 - protein, 59 aa, Artificial Sequence
  Synthetic
KDLLKKLEEEIRKIITENRKLNRDLHRENERIIRDVRRENKRLADELEEIIKEVRERLK

SEQ ID NO: 24385 - protein, 59 aa, Artificial Sequence
  Synthetic
SVEEKVEELEKEVRKALEDSKRHVDESEKRARDLARRSRELVRRWEEEVEKIVRELETR

SEQ ID NO: 24386 - protein, 59 aa, Artificial Sequence
  Synthetic
EDLLRKLADEIRRILEDNRDLNRRLNEKNKEVLDRLEELNKTLADELRDIIRKLEKELE

SEQ ID NO: 24387 - protein, 61 aa, Artificial Sequence
  Synthetic
KELEDVVRKIEEDLRRLEESNEKVHRENEEIIRRVDETNKKVMKEIKEMEKKVRDLVRERK

SEQ ID NO: 24388 - protein, 54 aa, Artificial Sequence
  Synthetic
EVERVIERLEKVVRDSAANVERSIRELERVVEESSKHVEDVKRELKKVVDEIRT

SEQ ID NO: 24389 - protein, 60 aa, Artificial Sequence
  Synthetic
SDLDRVREEAERVVETVRRSNKEVKKKLDRELKRLRDSNKDVVDKIKRVLEKLRELIKRR

SEQ ID NO: 24390 - protein, 54 aa, Artificial Sequence
  Synthetic
EIEEVRDKLRKVVEESSKHAEEVKRDLERVVEESTRNVDRVREDLKRVLDEIET

SEQ ID NO: 24391 - protein, 60 aa, Artificial Sequence
  Synthetic
SLRERIEELKEELRRVLEELERRHRETEKKLEEVLKELKRRHEELVRRLRKALKEIKDKL

SEQ ID NO: 24392 - protein, 59 aa, Artificial Sequence
  Synthetic
EEAIKDVERKVKKLLKELRDLSEKVRKESDDLLRRLRRESERVERETRKLEKELRDEVR

SEQ ID NO: 24393 - protein, 60 aa, Artificial Sequence
  Synthetic
SKADEVRKKVDDINKRLRETTDRVAEETKKLIEELKKSAEEVKREVDKINKDLRKLAEDG

SEQ ID NO: 24394 - protein, 56 aa, Artificial Sequence
  Synthetic
EKDVERLTRKSEKVVREIEKKNEELKRELTEVLKDDERRNKELVEDSRRVLEEIRT

SEQ ID NO: 24395 - protein, 60 aa, Artificial Sequence
  Synthetic
DKARDVARKVEELLERLRELSERVSRTSEDLNRKLKKISEDVSRTSKKLLDELRRAKEKG

SEQ ID NO: 24396 - protein, 56 aa, Artificial Sequence
  Synthetic
EEDVRRLKERVKKVMEELERRHERDKEKSRRVVEKLERDHREDLKRVKKVLEEITK

SEQ ID NO: 24397 - protein, 59 aa, Artificial Sequence
  Synthetic
SKADKVEEEVKELLKRAKALSDRVSEESRRLLKELRDSARRVEEEVKRLEEELRKLKED

SEQ ID NO: 24398 - protein, 56 aa, Artificial Sequence
  Synthetic
EEKVRRVLREVREMLKDLEKKHRDDIKRVTEVLKEDEEKNRDLMRKVDKFLEDIRK

SEQ ID NO: 24399 - protein, 59 aa, Artificial Sequence
  Synthetic
SKAEEVEELVKKLLAEVKKSLDDVRRTVEKLLREVRKSLREVEETVKRLLKRLKDLKDD

SEQ ID NO: 24400 - protein, 56 aa, Artificial Sequence
  Synthetic
EEKVEKLERDVRRALERDTRENKKLEDRVETALREDKKRNDDLREDVKRVLEEIRT

SEQ ID NO: 24401 - protein, 61 aa, Artificial Sequence
  Synthetic
DELEELIRRIEKLIRDSRKITDDVRKEIEKTIRESREINKEVHERNRKLLEEITEVVKRDG

SEQ ID NO: 24402 - protein, 56 aa, Artificial Sequence
  Synthetic
EEDLRRVDDRVRRVVEESEERLRRVYEESRKVVEESRKHLKEDLDRVKRTVEEIER

SEQ ID NO: 24403 - protein, 61 aa, Artificial Sequence
  Synthetic
SELERVEEEIKKLIRTSREINKEVAKRIEETIKESRDINKEVVDRIRELIERLREVVKRDG

SEQ ID NO: 24404 - protein, 56 aa, Artificial Sequence
  Synthetic
EKELKRVEDEVRKVVEESKDHLRKVYEKSKKVVEESKEHLDRVLREVEKEIEEIRR

SEQ ID NO: 24405 - protein, 61 aa, Artificial Sequence
  Synthetic
SELERVEEEIKRLIDESERINRKVVKEIEDTIRTSEEINREAHRRNRELIKRVEDVVRTKG

SEQ ID NO: 24406 - protein, 56 aa, Artificial Sequence
  Synthetic
EKELRRVEEEVRKVVRDSERHLDEVYKRSKEAVDRSKKHLDKDVEEIDRVVKEIER

SEQ ID NO: 24407 - protein, 61 aa, Artificial Sequence
  Synthetic
RELEEVKKEIDRLIREVEEVNKDVVRKIKETIRRSREINKRVVDEIRRLIKELDDVVKTKG

SEQ ID NO: 24408 - protein, 56 aa, Artificial Sequence
  Synthetic
ERELRKVLEKVERVVKKSRDHLDRVYEDSERVVRESEKHLDEVLERVREEIERIRK

SEQ ID NO: 24409 - protein, 61 aa, Artificial Sequence
  Synthetic
RELEEAEKTIEKLIKESRDINEKVARDIDKTIREIREEMKRVEEEIRDLIRRIREVVKRDG

SEQ ID NO: 24410 - protein, 56 aa, Artificial Sequence
  Synthetic
ERKLREVTKRVDKVLEESRRHLEEVYRKSKEVVDEIRKRLREVLKRVREDVERIER

SEQ ID NO: 24411 - protein, 61 aa, Artificial Sequence
  Synthetic
SELDEVAKRIKELIKESRRINEEVERRIKKTIDEVRKINKEAAKTVDDLIKTIRDVVRRKG

SEQ ID NO: 24412 - protein, 56 aa, Artificial Sequence
  Synthetic
EKKLRDLEEEVRRVVEESKDHLRKVYERSRKVVEESRKHLDEVLTRVDKVVKDIRT

SEQ ID NO: 24413 - protein, 60 aa, Artificial Sequence
  Synthetic
SELEEAEKKIERLIEEVRKMNKTVHEENERLIEDLRRVVKEAHERNKRLIEELEDVVRKI

SEQ ID NO: 24414 - protein, 59 aa, Artificial Sequence
  Synthetic
KDVEKKLKDVLDKVRKVVEESRRHLEESLDKVRRVAEEIRKRLKESKDRVDEAAKEIRR

SEQ ID NO: 24415 - protein, 60 aa, Artificial Sequence
  Synthetic
DELEEAEKRIKELIDRLEEFNEEVHRRNEKLIRELREVLKRVEEEIRRLIKELRDEVRKI

SEQ ID NO: 24416 - protein, 59 aa, Artificial Sequence
  Synthetic
KRVEERLERVLREVEEVVKRSRKHLEDSLREVEKAVKEIRDRLDEVLRRVEKAVEEIRT

SEQ ID NO: 24417 - protein, 60 aa, Artificial Sequence
  Synthetic
SELEDAERKVKELIDRLREVNRKVHEDNKRLIDELRDVNRKVAEEVRRLIEELKEVARRV

SEQ ID NO: 24418 - protein, 59 aa, Artificial Sequence
  Synthetic
KRVRDRLKEVEDRVRKVVEDSRRHLEKSLREVEEVIRESREHLEEVLRRVKEEADKIRK

SEQ ID NO: 24419 - protein, 60 aa, Artificial Sequence
  Synthetic
SELEKVREDIKRLIEDLRRANDRVRRESERLNRELREVNKRVHDDNRRLIEELRRLVKDI

SEQ ID NO: 24420 - protein, 59 aa, Artificial Sequence
  Synthetic
ERVRDELRKLLRTVEKVVEESKKHLKEVLDRSREVVEESKTHLEKSLTDVEKVVREIRT

SEQ ID NO: 24421 - protein, 60 aa, Artificial Sequence
  Synthetic
STLDEAVKRIDELIKRLREVNEEVARRSKRLNDELKKVNEDVARKIEELIRRLRDVVRKI

SEQ ID NO: 24422 - protein, 59 aa, Artificial Sequence
  Synthetic
KRVEEELERVLRKVEKVVKESRDHLEEVLRRSEDMARRSREHLEELLKRVEKVVREIRT

SEQ ID NO: 24423 - protein, 60 aa, Artificial Sequence
  Synthetic
SELEEAIRRIEKLIRELREVNKRVAEEVKKSNEESKEVNKRVKDDVKELIERLRDIVKKV

SEQ ID NO: 24424 - protein, 59 aa, Artificial Sequence
  Synthetic
KDVEDKLREVLRRVEKVAEESRRHLEKVARESEEVVKRSRKHLEEVEREVKKVIDEIRK

SEQ ID NO: 24425 - protein, 60 aa, Artificial Sequence
  Synthetic
RTLEEVEKEVEKLIEDLRRVNREVAERIKKSNEDSKRVVERVEDEIRRLIEELKDMVRKV

SEQ ID NO: 24426 - protein, 59 aa, Artificial Sequence
  Synthetic
ERVDKRLRDVLRKVKKVAEESRKHLEELAERSKEVVERIRRRLEEVLKRVREEAEKIRK

SEQ ID NO: 24427 - protein, 60 aa, Artificial Sequence
  Synthetic
SELEDAERRIERLIRELRKANEEVARRIEKSNEDSRRVNKKVAEEIERLIKELRDVTKDV

SEQ ID NO: 24428 - protein, 59 aa, Artificial Sequence
  Synthetic
KRVEEELKRVLDEVKRVIEESKERLKKWLRDSERVVEESRRHLEELRKRVEKAVREIRT

SEQ ID NO: 24429 - protein, 59 aa, Artificial Sequence
  Synthetic
RVEDEVRKMREKSEKVDREIREAVRRSLTRIKEVVDEIRDEVRRSEDKVKKEIDRLRKE

SEQ ID NO: 24430 - protein, 62 aa, Artificial Sequence
  Synthetic
EEVDKLLDEVRREADESNTRLRERVKEVNKRNEEVIEELRKRVEEVHRTNEDLIRELRKKTT

SEQ ID NO: 24431 - protein, 59 aa, Artificial Sequence
  Synthetic
REEEELERVKRRSEKVDEEIKKRLREVAEEVKRSNEEVKKRLEEVLRDSKRKLDELREE

SEQ ID NO: 24432 - protein, 56 aa, Artificial Sequence
  Synthetic
VRELIRELEESNKRVKDVLRKLIEEVKKSDDELREIVKRLVEEVERSNKELEDRVR

SEQ ID NO: 24433 - protein, 59 aa, Artificial Sequence
  Synthetic
REEERLKKLKEDSDRVDREIERKAEKVLEESEEVDRDIERKLREVERKSREVLEELKKR

SEQ ID NO: 24434 - protein, 56 aa, Artificial Sequence
  Synthetic
LEELRKEVEKSNTDLEKIIEDLIRRLKKSNEDVRRTVTELVKEVDRSNKKLEDEVR

SEQ ID NO: 24435 - protein, 59 aa, Artificial Sequence
  Synthetic
REEEELEKLRERSERVDDEIRKRLREALERSREVDEELRRRAEESKKESDEVIKDLARR

SEQ ID NO: 24436 - protein, 56 aa, Artificial Sequence
  Synthetic
LDELRREVEKSNEDVRRFLEKLVRDLEESNRRVRERIKRLHEENKKSNDELRKRTK

SEQ ID NO: 24437 - protein, 60 aa, Artificial Sequence
  Synthetic
SELEELKKKSKKLNDDIERVVEEVLKRSEDINERVKKEVKDVIDRNTDVLRRVKRDVERE

SEQ ID NO: 24438 - protein, 56 aa, Artificial Sequence
  Synthetic
EEAVRKVEKENRESVEKLKKAVKEVRDRNRKVIEELKDLVRRSRDKSKKVVDELRK

SEQ ID NO: 24439 - protein, 60 aa, Artificial Sequence
  Synthetic
REVDKARKDVDDILKRVTEAVDRMDRDNERVLREVEETIRKLEEDSRRINKDIEDAVRKE

SEQ ID NO: 24440 - protein, 56 aa, Artificial Sequence
  Synthetic
RKDVEDVRRKVEEVVRRMEKRLRESEKKSRDVVRKLRKVIEDVERDNDRVVKELEK

SEQ ID NO: 24441 - protein, 60 aa, Artificial Sequence
  Synthetic
SELEEMRRRIERLAEEVRTTVEEVVRRSEELNKEVEKAVRKVVDENRRVLEEVKEEVRKE

SEQ ID NO: 24442 - protein, 56 aa, Artificial Sequence
  Synthetic
KEEVKRVEERVERVVEELRRLVEEVRKRNEDSIEKLKDLVRRSKEESERVVKELED

SEQ ID NO: 24443 - protein, 60 aa, Artificial Sequence
  Synthetic
SDLERVRKESEDLNRRIKTEVRRVLEELKELLKRIKEEVEELVRRNEEVLKRVREEVTKR

SEQ ID NO: 24444 - protein, 56 aa, Artificial Sequence
  Synthetic
EEAVRKVKEDNDRSVEELKELVKDVERKLREAIKELEDLIRRSEEKSREVVERLRR

SEQ ID NO: 24445 - protein, 61 aa, Artificial Sequence
  Synthetic
SLEEEVRRVKKELRRVLEKSTKLIEEVTRELETVLRESRDRVRRAKEELKEAVREVRRDVG

SEQ ID NO: 24446 - protein, 59 aa, Artificial Sequence
  Synthetic
EEEVRKVVEDVERVLRELEKHDRDVAEEVRRVLDELRKHDEDVRRKLRKVLEELKEKIK

SEQ ID NO: 24447 - protein, 61 aa, Artificial Sequence
  Synthetic
SIEDRVRRVEKELREVERKSTETVKRVEEELEEVVRRSRELVERVKERLKKMVEEVKRDTG

SEQ ID NO: 24448 - protein, 59 aa, Artificial Sequence
  Synthetic
EKELEDVERDVRRVLKEAEDNDRRVVERVRRVLKEAEKHDRDVVRRVDEVLKRLKEEIR

SEQ ID NO: 24449 - protein, 61 aa, Artificial Sequence
  Synthetic
SIEEAVERVAKRLEEALRRSTEEVKRVKEETRESVERSRREVEKVEKELREVVERVRRERG

SEQ ID NO: 24450 - protein, 59 aa, Artificial Sequence
  Synthetic
DDRLRKVVEELETVLDELRKNDRRVIEEVRRINDELRRRDEEVIKRVRDMLKKLTEEIK

SEQ ID NO: 24451 - protein, 59 aa, Artificial Sequence
  Synthetic
SLEDKLRENKRRSEAVVEEAERRLRKNEEDSRKVVRELEDKLRRLREESKEMADRLRRK

SEQ ID NO: 24452 - protein, 59 aa, Artificial Sequence
  Synthetic
DKVVEKLLKESKEILDRARETVKRILDDSERILRELRRRVEKLIKESRDILRKVDEDER

SEQ ID NO: 24453 - protein, 59 aa, Artificial Sequence
  Synthetic
KAEEILEDIKRAVEEALRKLEESVRRNKERIREAVERLRETVKEAKERVDEVKRELEEK

SEQ ID NO: 24454 - protein, 59 aa, Artificial Sequence
  Synthetic
EEVLRKVREDLERIIRRVEEESKKSHKDSEDVLRRVEERSKKSLEELEDIIKKVKEEAD

SEQ ID NO: 24455 - protein, 60 aa, Artificial Sequence
  Synthetic
DMEKIVRDVEDRVREVEDRLRRIAERNKREIERVVEELKKTVKEIEDKVREVVKRLEEKG

SEQ ID NO: 24456 - protein, 59 aa, Artificial Sequence
  Synthetic
EEVLRKVVTDLERILRRVLEDAKRVHEESKRRLDDVRRRSEDSVRRLEEELKRVEEEVD

SEQ ID NO: 24457 - protein, 59 aa, Artificial Sequence
  Synthetic
DAEKILEDIKREVDEVLKRLRDIIRRNEEEIRRAVEDLKRIADEDREAIKRVIDELRKK

SEQ ID NO: 24458 - protein, 59 aa, Artificial Sequence
  Synthetic
EEALRKVVEELRKILRDVTEVAKKVHRDSEEVLKKVREDVRKVHEDSKRVLDKVDKDAN

SEQ ID NO: 24459 - protein, 56 aa, Artificial Sequence
  Synthetic
SRLEEVLRRHEELNERVERTVKKVHDDSKELIDRIRKDVEKVVRELEKVIDEVEKN

SEQ ID NO: 24460 - protein, 55 aa, Artificial Sequence
  Synthetic
EKVEEIERHARKVERRLEEIVDRNRKSVDKAKKELEKIVRDVRRRVEEVVDRLRK

SEQ ID NO: 24461 - protein, 56 aa, Artificial Sequence
  Synthetic
DEVRRVLEELRRLLDEVRERVRRVVEEHKRLNDRIRREVERAHEENKRVDDDLRRK

SEQ ID NO: 24462 - protein, 55 aa, Artificial Sequence
  Synthetic
KDVKEVKKEVERVKEELRRLVEELRKHAEKVKEELKRIVDRDRETNERTVEELKK

SEQ ID NO: 24463 - protein, 57 aa, Artificial Sequence
  Synthetic
SEAEDVLRKLERLLEEVRERVADAHRRSKELLDRVDKEVKRVNEENRKLDDDIRKKV

SEQ ID NO: 24464 - protein, 55 aa, Artificial Sequence
  Synthetic
DEARKVREKVKKVEEELRRIVEEDRKEVEKVKRKLEKDVREDEKENRKTVRELEQ

SEQ ID NO: 24465 - protein, 60 aa, Artificial Sequence
  Synthetic
TLEELLEEIRRKVEEVLKKLEDLLRRDHEEVKKVEEELEEINKRSEDRVRKAVRRLERDA

SEQ ID NO: 24466 - protein, 59 aa, Artificial Sequence
  Synthetic
EEAIRKVLRKLEEEAKRLEKRIEEVLKESKDRIDELRKRIEESHKDLERIIEELERRIK

SEQ ID NO: 24467 - protein, 60 aa, Artificial Sequence
  Synthetic
RLEELLERIRKRVEEVKRESERLLKEDHDRVEEAKKRSEDINRRSKEEVDRMLRELETKA

SEQ ID NO: 24468 - protein, 59 aa, Artificial Sequence
  Synthetic
EEAIRRVLKKLEEIAKRLLDENRRVLEESKKIIDKLEEDNRRSHRELKRILDELRKRIK

SEQ ID NO: 24469 - protein, 60 aa, Artificial Sequence
  Synthetic
KEAEDLEKKVEDILRRVRELLEELHRRSEKILKDVKDRSRDLLRRVREILKRVEEKKERV

SEQ ID NO: 24470 - protein, 56 aa, Artificial Sequence
  Synthetic
ERLVREVEKKLRTVEEEVRRIVKENKERLDEAREDVKRSNKTIRDELERARERIET

SEQ ID NO: 24471 - protein, 60 aa, Artificial Sequence
  Synthetic
SEAEDLTRRVREILKRVEDLSKKLNDDTKKILDELRELSKRLMEEVKKILRRVEEKKERV

SEQ ID NO: 24472 - protein, 56 aa, Artificial Sequence
  Synthetic
KRLVDTVREELERVRKKVEDSDRRNEEELRKVKEEARRSNERIRELLKTVEDRIRT

SEQ ID NO: 24473 - protein, 60 aa, Artificial Sequence
  Synthetic
DEVRKLVREVEDILRRVREKSERLVRLVEEILRRVLEESRRLLEETREILERVEEKKERV

SEQ ID NO: 24474 - protein, 56 aa, Artificial Sequence
  Synthetic
ERLVREVKELLDRVADEVRKSDEDIRRLLEDAARKVEESNKRNRDLLETVRRRIEK

SEQ ID NO: 24475 - protein, 60 aa, Artificial Sequence
  Synthetic
SEVEKLKKEVKESSKEVIKEVEKLHRESEKSSEDVKREVEKLHRRSKEVADEVRERVRRR

SEQ ID NO: 24476 - protein, 56 aa, Artificial Sequence
  Synthetic
ERVVEEIERDVRESLRRIEEIIRRNEKRVRESLEDLKRILRENKETVRKVVDELRK

SEQ ID NO: 24477 - protein, 60 aa, Artificial Sequence
  Synthetic
SEVDDLTRRVRDVLRRVEEKVRDLHRRSEKVARDVEREVEELHERSKDVARKVEEKVRRI

SEQ ID NO: 24478 - protein, 56 aa, Artificial Sequence
  Synthetic
KDVVDRIRREVEEMLRRLEDILRRNEDTVRRVKEKLKRIVKRDEEEVRKVLDRLRK

SEQ ID NO: 24479 - protein, 60 aa, Artificial Sequence
  Synthetic
SEVEELKKRVEDVAEEVKDRVRKLHEKSERSSREVEKEVRKLHEESRRVAREVTERVRRI

SEQ ID NO: 24480 - protein, 56 aa, Artificial Sequence
  Synthetic
EEVVKEIRDTVEKVLEEARKIIEDNRKRVAESVETLKDIIRRDEKTMRDVVDELRT

SEQ ID NO: 24481 - protein, 60 aa, Artificial Sequence
  Synthetic
DEVEELRREVEESSRRVEKEARRLHKRSEESSREVEERLKRLHDDSRRVAREVEEIVARS

SEQ ID NO: 24482 - protein, 56 aa, Artificial Sequence
  Synthetic
EDKVRDIKRRIDESKRKIEEIIKRDKEEAEKSEEKIKEIIERDRETVERVVRKLRE

SEQ ID NO: 24483 - protein, 60 aa, Artificial Sequence
  Synthetic
EIEEIEEELKDRVRRSEEKLRRIEKELRELVEKSRKELEDLLDKDRRDMKRVADELRRDD

SEQ ID NO: 24484 - protein, 59 aa, Artificial Sequence
  Synthetic
RRVVEELTRKLEESIKKSEDEVKKVKERLEESIRRSKERLEDARRESERVLTEIRERLR

SEQ ID NO: 24485 - protein, 60 aa, Artificial Sequence
  Synthetic
EVERILDELRRRVEEVVKENEKALDTLRKESERTEEENKRLLDEAREKVDRVVKELKRDD

SEQ ID NO: 24486 - protein, 59 aa, Artificial Sequence
  Synthetic
EKVLRDLAKKLEDVIRKSEELTKELAKRLRESSKRSIDLTRELLKRLEEVLKKVRDALR

SEQ ID NO: 24487 - protein, 60 aa, Artificial Sequence
  Synthetic
SVEEIVEEIRRRSKETEDRNRRVVEELEERVRRVLEELKKIVEDARRKVEKVARELKRDD

SEQ ID NO: 24488 - protein, 59 aa, Artificial Sequence
  Synthetic
EKVVEELLRRLKETSDDSLRRTDELRKELERVLKEVRERLKELDRELKRVLDDVREKIR

SEQ ID NO: 24489 - protein, 59 aa, Artificial Sequence
  Synthetic
KLEDILRKIEKELKEVKEKSERIVREIEKRHEDDKRRVEDIVRRIKEEVERVVKEIKEA

SEQ ID NO: 24490 - protein, 59 aa, Artificial Sequence
  Synthetic
DEVMKKVEKEVRDVIKELEDTAREVEKKSEKVLKETNDLAKEVMDKVRKVAEDLRKKLE

SEQ ID NO: 24491 - protein, 59 aa, Artificial Sequence
  Synthetic
ELEEIVRRIEEEVRRADKEVKEILTEIEKEHRRDVERSDRSLEKIKRDVDRALEEVERV

SEQ ID NO: 24492 - protein, 59 aa, Artificial Sequence
  Synthetic
REVMKKVTEEVREVLDRLRELLKEVAKRSEEVIKRTNELNETVMRDVERVLRELREELR

SEQ ID NO: 24493 - protein, 59 aa, Artificial Sequence
  Synthetic
SEVEKLEEDFREMIERSERTLEKLKKENEDASKKSKEKLEKLLREMKEIIDRIRDLIRK

SEQ ID NO: 24494 - protein, 55 aa, Artificial Sequence
  Synthetic
EEVIKKLRELLERLEREHRKVIEELKKSNKKNEEDIRRVLEELRRLVKKLADDAR

SEQ ID NO: 24495 - protein, 59 aa, Artificial Sequence
  Synthetic
REAEELLKEMKRASEKSEKIIEDLRRENEKLSKESEDIIRKLKEDNERMIRTIEELIRA

SEQ ID NO: 24496 - protein, 55 aa, Artificial Sequence
  Synthetic
EEVIKELRELLERNEREIKKVLDELRRSNEKNERDIERALEELKRTNDELAKRAK

SEQ ID NO: 24497 - protein, 59 aa, Artificial Sequence
  Synthetic
DEVEKLRREIEEIIKEWEKRTRDLKREMKKISDDSRRRIEELLRDFKRIIDELRKAIED

SEQ ID NO: 24498 - protein, 55 aa, Artificial Sequence
  Synthetic
KEVIERLRELVKRVTDKVRKVNEELRKLLEDNADEIRRAIERLRELLRRLEEEAR

SEQ ID NO: 24499 - protein, 59 aa, Artificial Sequence
  Synthetic
SEVEKLVREAEKIIEDIRRVIEELLRRARKINKEWDDVSRKLKEDAKRIIDTVLKLIRE

SEQ ID NO: 24500 - protein, 55 aa, Artificial Sequence
  Synthetic
KDVIERLRDLVRRVKEDIERVLDEWRKSSEEAEERSRRVIEELRRLLEELKERVR

SEQ ID NO: 24501 - protein, 59 aa, Artificial Sequence
  Synthetic
SELEELKKTMDEVNKETKKENDRLLDEARKVNEESRRRLEKLRKELDDVVREVEDARRR

SEQ ID NO: 24502 - protein, 59 aa, Artificial Sequence
  Synthetic
SDKVERVLRELRKSSRKVHEDSKKVVEDLERSSRTVEKELRDALKELEDKVREVEKKLK

SEQ ID NO: 24503 - protein, 60 aa, Artificial Sequence
  Synthetic
DELEKLLEEARKVNEETKEANERLLREMEKVNKESEDANRKLLEELKEVVDRVDDLARRN

SEQ ID NO: 24504 - protein, 59 aa, Artificial Sequence
  Synthetic
SEDVKRVVDELRESSREVHRRSREVVERLRRSSEEVHKKSRDVLRELTRLVREVKERLR

SEQ ID NO: 24505 - protein, 60 aa, Artificial Sequence
  Synthetic
DELETLLRELERVNKETERELERLKREAEEVNKATRKDLDELRKEIDKVVKEVEEARRRN

SEQ ID NO: 24506 - protein, 59 aa, Artificial Sequence
  Synthetic
SERVKKVVDELRDSSRRVKEKLEDVVRRLRDLSRRTKEEVEKVEEDLRRKVREVEERLR

SEQ ID NO: 24507 - protein, 60 aa, Artificial Sequence
  Synthetic
DELETLLDEAKKVNEETRRANRELRERVREVNKRTEEELKKLRDRLEKVVDDVDKLRKRN

SEQ ID NO: 24508 - protein, 59 aa, Artificial Sequence
  Synthetic
SRRVREVEERLKKLSEDTHRDSRRLVEEMRRLSKETEKKVEDVVRDLRRLVKEVEERVK

SEQ ID NO: 24509 - protein, 60 aa, Artificial Sequence
  Synthetic
DELEKLRRELEEANRRTKKANEEILREAERVDERSEEELRKILETLKKVVKDVDDMARRN

SEQ ID NO: 24510 - protein, 59 aa, Artificial Sequence
  Synthetic
DRRVRTVVEELKKLSRETHEDSKRVVEELERLSRESERKLREVVKEMRKLVKDVEDKVK

SEQ ID NO: 24511 - protein, 60 aa, Artificial Sequence
  Synthetic
DELEELLRRVEEVDKESKRRLDEIKRRMKEVNDRTREALRDLLRRLAEVVKRVLDLIRRG

SEQ ID NO: 24512 - protein, 59 aa, Artificial Sequence
  Synthetic
SERVKKVVDDARDSSRKTVERLETVVRDLKRSSDDVEREVRELLKELERLVKKVEDDAK

SEQ ID NO: 24513 - protein, 60 aa, Artificial Sequence
  Synthetic
RELEELLRKVRKLVEEIERELKKLLEEDRRLSEESREELRKLLEDARRMIREIEELLKRR

SEQ ID NO: 24514 - protein, 58 aa, Artificial Sequence
  Synthetic
EDAKRVLKEIRRLAEELKKSVKRVIEEVEDSNRRNEEEVRRVLEEIRRLLEDLDRKVK

SEQ ID NO: 24515 - protein, 60 aa, Artificial Sequence
  Synthetic
SELEELLKDAKRVIDTSRRLITELEKRDEEIIRRIKDLLRRVTEEAKRMLDEIREELKRR

SEQ ID NO: 24516 - protein, 58 aa, Artificial Sequence
  Synthetic
EKAKRVLEEIRKLLEDSKKESEDVARKLKKSNDELRRDVERVLREIEKRLEDLKREVE

SEQ ID NO: 24517 - protein, 60 aa, Artificial Sequence
  Synthetic
SELEKLLREVEKIIRDSDDLLRRLEKRNRDLIRTSEKLLKEVKDDVDRVIRELERLLEEE

SEQ ID NO: 24518 - protein, 58 aa, Artificial Sequence
  Synthetic
EKAEDVLRRIEKLLDDSRRRSEKVAKELEESNERSKRKTEKVLKEIKEALDRVREKVK

SEQ ID NO: 24519 - protein, 60 aa, Artificial Sequence
  Synthetic
SEIEKVARDVEELLKKVEKKNRDMVERVRRLLEKVKRENEELVRRVEESNERLKERVDRS

SEQ ID NO: 24520 - protein, 56 aa, Artificial Sequence
  Synthetic
VEELEKTVRKLARDAEKISEDVERRVRELARRLRKISEEVLRRNKELVRRVDEEIR

SEQ ID NO: 24521 - protein, 60 aa, Artificial Sequence
  Synthetic
SEVEEAVERVKKLLEKVRKDNEEFRERVRKSNEEAEERNRRVVEEVRRSNEELKEKVERS

SEQ ID NO: 24522 - protein, 56 aa, Artificial Sequence
  Synthetic
VEDLKRRVKELADEARRISEKVLRDNKRLLTELDKISERVLRENEKLVREVEETIR

SEQ ID NO: 24523 - protein, 60 aa, Artificial Sequence
  Synthetic
SEIEKVAREIEELLRKVAEDNRRMVERVRRLLEEVKTRNKKMVDEVKESNERLKDKVRRR

SEQ ID NO: 24524 - protein, 56 aa, Artificial Sequence
  Synthetic
VEELKRRAERLIEELRKISEEVERRVKRLVEELEEITRRIKEENDKLVREVEKELK

SEQ ID NO: 24525 - protein, 60 aa, Artificial Sequence
  Synthetic
SEVEKVVEELKDLVRKSSEKNRKVAEEVKKSNDDLRRKVEEAVREVRESNERLKREVDES

SEQ ID NO: 24526 - protein, 56 aa, Artificial Sequence
  Synthetic
VEELKDRVRKLIEESERISREILKTNRKLLKELEELLKRLLKRNRELVREVKEEIK

SEQ ID NO: 24527 - protein, 61 aa, Artificial Sequence
  Synthetic
SDIERVVKEVKDLLEEVRKDNERVMDEVRKLLEELKRKLRKVVEEVRRSNEELKKEVDRRN

SEQ ID NO: 24528 - protein, 56 aa, Artificial Sequence
  Synthetic
VETLRKEVEELADDLRRISEEVRDRVRKLVTKAEEILRRVLETNKKLLKEVKETLK

SEQ ID NO: 24529 - protein, 60 aa, Artificial Sequence
  Synthetic
SEIEKVAEEIKKLLRKVEEDNKTVVEEVRRSNEKLKRDNDKVVRDVERSNRELKEELDRS

SEQ ID NO: 24530 - protein, 56 aa, Artificial Sequence
  Synthetic
VEELKKRVEELARRAKEISDKVRDDNEKLLRELREITKRVKEENDRLLKEAKDAIK

SEQ ID NO: 24531 - protein, 60 aa, Artificial Sequence
  Synthetic
KEIEDVAKRVEELLRESSREVEEVLREVEELVRRSTRRNEEAVRRVRKSNKELEDEVRRS

SEQ ID NO: 24532 - protein, 56 aa, Artificial Sequence
  Synthetic
VKTLLDEAKRLVDRSRELLERLLRDVRRLIKESDKITRELERKNEKLLKEVKEEID

SEQ ID NO: 24533 - protein, 60 aa, Artificial Sequence
  Synthetic
SEIEDAEREVRRLLRESSERVKTVIEEVRELLRRVKRENDEAVKEVEKSNRDLEDKVRRG

SEQ ID NO: 24534 - protein, 56 aa, Artificial Sequence
  Synthetic
VEELKERVKRLVADSERLLKELRDRVKELADEARRTTEEVLRRNRELVRRIEEDIR

SEQ ID NO: 24535 - protein, 60 aa, Artificial Sequence
  Synthetic
SELDEVLKTVRKIIEENEKIVKEVLDTSRRSVEEVRKHTKEVLDRVRELAKELEDATRKT

SEQ ID NO: 24536 - protein, 58 aa, Artificial Sequence
  Synthetic
EEVDKVAEEIEKLVRESNRKVREVVKEIEKLNRDMRKESEDAVKEIEELLRTLEEKVR

SEQ ID NO: 24537 - protein, 60 aa, Artificial Sequence
  Synthetic
SELDEVLKTVEKIIRDNEEIVKEVLRRSERSIKELKKHTDDILRKARKLAEELKRVVERT

SEQ ID NO: 24538 - protein, 58 aa, Artificial Sequence
  Synthetic
KRVKDVAERIRELVEESNRKVREVVERIKDLNRKVNKTSEDAAREIEKLLEELREEVR

SEQ ID NO: 24539 - protein, 60 aa, Artificial Sequence
  Synthetic
DELEEVLKRVREIIKRNEDHSDRVREKSRESVKELEEHTERVLRDVERLARELEEMIDKT

SEQ ID NO: 24540 - protein, 58 aa, Artificial Sequence
  Synthetic
KKVDDVAREIEKLLKESNDKSRELVKEIKDLNKRLNEKSEEAVKRIEDLLRRIEERVR

SEQ ID NO: 24541 - protein, 60 aa, Artificial Sequence
  Synthetic
KELEDVLERVKEIIKRNEEILDKVRREVEESVRRAEEILKEVLERVRDLVRKLDDIKDKM

SEQ ID NO: 24542 - protein, 58 aa, Artificial Sequence
  Synthetic
EEVKRVADEIKRLADESNEKVRRVVRRIDELNKEVDRKLKEVMKEIKKELEDAERRVR

SEQ ID NO: 24543 - protein, 60 aa, Artificial Sequence
  Synthetic
DELEEVLRRVRKIIEENKEIVRRVLEDVKRSVEELERHTERVLREAKRLADELEDARRKI

SEQ ID NO: 24544 - protein, 58 aa, Artificial Sequence
  Synthetic
EEVKRVAKELRELLERSNREVRRVVEEIKKLNDEVRKKSEEMRRRIEKLLEELERKVK

SEQ ID NO: 24545 - protein, 60 aa, Artificial Sequence
  Synthetic
SDLEEVLRRAEKLIEDLERIVRKVLEDSDRSIDEVRRHTEKVLRDVRKLAEELKDIARKT

SEQ ID NO: 24546 - protein, 58 aa, Artificial Sequence
  Synthetic
EEVKRVIDEIRDRLRKAEERVRKVIEDIKRKNKKLREDSEKAEREIDELLRKVEEDVK

SEQ ID NO: 24547 - protein, 60 aa, Artificial Sequence
  Synthetic
SELEEVLERVKDLLKKLKEHSDRVLEESKESIDRVRKHTEEVLRTARELIERLDEMRKRT

SEQ ID NO: 24548 - protein, 58 aa, Artificial Sequence
  Synthetic
EEVKDVAREIRRRLDELRKDSERVAEEIRRLNKKLRDESRKAIKEIEELLRRVTKKVE

SEQ ID NO: 24549 - protein, 60 aa, Artificial Sequence
  Synthetic
DELEEVLERVRKLIDELRKHSKEVLDTVRDLLRRHKKKNEDSLRTVRKLLTDLEDAVRKI

SEQ ID NO: 24550 - protein, 58 aa, Artificial Sequence
  Synthetic
ERVKRVAEEIKKLLEDLRKESEDVVKELEDLLDELRRRTEKVVREIEELLKRLEERVK

SEQ ID NO: 24551 - protein, 59 aa, Artificial Sequence
  Synthetic
SEVERVERRLEKVIEEDKERTKRVEREVEDSNKKDDDLTREVLDRVRKSARDVERKLEE

SEQ ID NO: 24552 - protein, 55 aa, Artificial Sequence
  Synthetic
REALRRLRELVKKLEDDNRRVLRRLDKLLDDVRKKNEEAMRESRDLSRKVAEKIR

SEQ ID NO: 24553 - protein, 59 aa, Artificial Sequence
  Synthetic
DEVREVEKRVRESNERDKKLLREVLEEVRRSDKDDDDRTRKVLKRVEKAAEEVKRLLEK

SEQ ID NO: 24554 - protein, 55 aa, Artificial Sequence
  Synthetic
EDVIRKLRKSLKEVKDDSRRVLKELDDSLRETHKRNRDAMRRLDELLEEVARRIK

SEQ ID NO: 24555 - protein, 59 aa, Artificial Sequence
  Synthetic
DEIEEIKRRIEKSSEDDKRVLRELEARAREIRKELDERVKRLEKRIKELLERLRKLKED

SEQ ID NO: 24556 - protein, 58 aa, Artificial Sequence
  Synthetic
RDVRRVLEEWKRLSRKNEEENKAVIEKLRALLEDLKRRLKEVLKRIAELVKKIADELK

SEQ ID NO: 24557 - protein, 60 aa, Artificial Sequence
  Synthetic
RESEELRREIEKISRENKELVRRLEEAIKRLSDEDKELVERLRRETKKIADKVEDLLEKL

SEQ ID NO: 24558 - protein, 55 aa, Artificial Sequence
  Synthetic
EEVLREIKKIIDDNRRENREALERIKDIVRRNEEENEKALRESRKRTRELEERLR

SEQ ID NO: 24559 - protein, 60 aa, Artificial Sequence
  Synthetic
SRVETIRKRVEDLIRRSEDLIRRLEEDVKRVVDEIRKLLEKLKEDDERVIRRIEDLLRKE

SEQ ID NO: 24560 - protein, 55 aa, Artificial Sequence
  Synthetic
ERVVEEIKERLDRSRRRTEEALERIRKRLEEVKKEVEDVLREVEKTNREIKKEVR

SEQ ID NO: 24561 - protein, 60 aa, Artificial Sequence
  Synthetic
SRVDELRRRVEELLKRSKELLEEIKRRDEEVLRRIKELLDRLRERVDDALRKISELLTRE

SEQ ID NO: 24562 - protein, 55 aa, Artificial Sequence
  Synthetic
EEVVREIKKKLTESREDTKRLLEELKKTNDDIRKDVERLRREVEKKVRDIERRVK

SEQ ID NO: 24563 - protein, 59 aa, Artificial Sequence
  Synthetic
SEVEKLLEEVRELTKRHKEELRRLNKEMEKATRDHLRKSKKLNDEAREMVRRVEELVKN

SEQ ID NO: 24564 - protein, 58 aa, Artificial Sequence
  Synthetic
ERAARVKEELDKLHKDLEREVRESKRTLKELHDRLRKAVEESKEHLKRLLDELRKKVK

SEQ ID NO: 24565 - protein, 59 aa, Artificial Sequence
  Synthetic
DEVERLLEEVRRVVKEIEDRSRKLNEDARRVTEDHLRKSEELNRRVEDAVRRIRELTKN

SEQ ID NO: 24566 - protein, 58 aa, Artificial Sequence
  Synthetic
EEARKIRETLKRLLDELRKKLEESKKHLDELHDRLRRELEKSKRHLEELLKRLEDELR

SEQ ID NO: 24567 - protein, 59 aa, Artificial Sequence
  Synthetic
SELERLLEKARRDTERHLRESERLNRELKKATDDHLRKSRELNKRLEEVVRRVEEESRN

SEQ ID NO: 24568 - protein, 58 aa, Artificial Sequence
  Synthetic
REAKKVEDDLRDLHRRLKEAVDRSKKHLEDLHKELEDELKRSIDHLRKLLEEVKRKLD

SEQ ID NO: 24569 - protein, 59 aa, Artificial Sequence
  Synthetic
SRVEDLLRRVREVVKRVKKDLTKLLEEVKRMTDEHLKRSKELNDRAEEIVRRLKELLDR

SEQ ID NO: 24570 - protein, 58 aa, Artificial Sequence
  Synthetic
ERAREVVERLDELLKEVADRVEEVKDRLRKLHRKLEESVKKSLEHIKRLIDDLRRKAK

SEQ ID NO: 24571 - protein, 59 aa, Artificial Sequence
  Synthetic
RELEKLLEDARRVVTTLTRASEKLNEDVKKVTEEHKDRIRRLLDTVRRIVEEVDKRTKG

SEQ ID NO: 24572 - protein, 58 aa, Artificial Sequence
  Synthetic
EEARKVKEELDRLLEDLRKKLEDSKRHLDELHRELEETVREVSERLKELLDAVRRRAK

SEQ ID NO: 24573 - protein, 59 aa, Artificial Sequence
  Synthetic
SELEKLLKDVADMVREITERSKKLNDELKKLTEDHDRKIKRLNERLEEIIREVEKLVDD

SEQ ID NO: 24574 - protein, 58 aa, Artificial Sequence
  Synthetic
DEARKVAERLKELLDRLRRKLEESKRHADELHERLRKSVEDSKKHIKDLVDELKRRVD

SEQ ID NO: 24575 - protein, 60 aa, Artificial Sequence
  Synthetic
SRVEELLKRLEDATRRHLEVSKRLNDDLRRATKDHLDKLRELNERVKKVVDDVVEKIKSN

SEQ ID NO: 24576 - protein, 58 aa, Artificial Sequence
  Synthetic
EEAREVRERLDRLHEELEKEVRRSEKTLKELHDRLRKEVERSKRHLDELLKDLEDKVR

SEQ ID NO: 24577 - protein, 59 aa, Artificial Sequence
  Synthetic
SRVEKLVREVEKVVEEVERTIRKLLEDVKEMTDRHLKMIEDLNRELEEIVRRVTELIKN

SEQ ID NO: 24578 - protein, 58 aa, Artificial Sequence
  Synthetic
DEARKVKKRITELVERVEREVDRVKKELEKLHERLKREVEKSSEHIKRLLDELRKRAE

SEQ ID NO: 24579 - protein, 59 aa, Artificial Sequence
  Synthetic
RELEEILRRVKEVTKDHLDKIDELNKRLDKATKEHLERLRDLNRRLKEVVERIEEEIRN

SEQ ID NO: 24580 - protein, 58 aa, Artificial Sequence
  Synthetic
READKVRKDIRRLHEELAREVKKSEDHLRKLHEELRDEVRRSEEHLDALLEDLKRKVD

SEQ ID NO: 24581 - protein, 59 aa, Artificial Sequence
  Synthetic
SELEKLLRDMEEATKRHDEMLKKLNDEIRKVVERILKELEDLNRRLEEIVRRLKEESKN

SEQ ID NO: 24582 - protein, 58 aa, Artificial Sequence
  Synthetic
EEADDVRRRLERLHRELRKSVETSKKHLKELLDRLAKSIEDSKKHARELLKRLEEDIK

SEQ ID NO: 24583 - protein, 59 aa, Artificial Sequence
  Synthetic
SEVEELLDRVRKVVEDLMRESKRLNDELKKIVDDILRRLRELNKEIKDVVDEIKKLLDN

SEQ ID NO: 24584 - protein, 58 aa, Artificial Sequence
  Synthetic
EEADKARKDLKRLLDRLRREVERSKEEMDKLLEDLERAVRESEKHLEKLLRDLERRAR

SEQ ID NO: 24585 - protein, 59 aa, Artificial Sequence
  Synthetic
SRLEELLKRLDDIVKRVLTKIRELNERLKKIVEELLRRSEELNREVRRVAEEIRRLEEG

SEQ ID NO: 24586 - protein, 58 aa, Artificial Sequence
  Synthetic
DKARDVRRTIRKLVRDVAEAVRRSTEHIDKLLEDLEREVRRSERDIERILRELEEEAR

SEQ ID NO: 24587 - protein, 59 aa, Artificial Sequence
  Synthetic
SDVEKLLEDVRRMTEEHKELIKELNERVERIVRKVVEDSKKLNDELREIVKRVEDESRN

SEQ ID NO: 24588 - protein, 58 aa, Artificial Sequence
  Synthetic
EEAARVREDLDRLHEELERFVRESKKHLDEMLKELRRRLERSKEEIDRLVKEAEEKLR

SEQ ID NO: 24589 - protein, 60 aa, Artificial Sequence
  Synthetic
REVEEVLKEVKKIVDRNREELKRVLDEIRELVKRIEDDLRRVNEESEKLVRTLLELMRRG

SEQ ID NO: 24590 - protein, 55 aa, Artificial Sequence
  Synthetic
EEVRERIERLIEKSERDVREVKKKVEELARRLREEVEKLKKHVKRLLEELKKAAD

SEQ ID NO: 24591 - protein, 60 aa, Artificial Sequence
  Synthetic
SEAEDALRKIKKLVDEVVERIKKVDDDSRKLVEEVERTIEKLDKESEDLVKKVKDMKRRG

SEQ ID NO: 24592 - protein, 55 aa, Artificial Sequence
  Synthetic
EEVKKEVKRLLEELKRRLDESNKRNKRLIDELRKKLEDSRRRNEELLRDLKETAT

SEQ ID NO: 24593 - protein, 60 aa, Artificial Sequence
  Synthetic
DEAEEVERRSRELVERAKTEIEKLDRESKRLVDTVARKIEEVDKRSEELVRTVEELRRRG

SEQ ID NO: 24594 - protein, 55 aa, Artificial Sequence
  Synthetic
EEVEKENRELNRRLKEALDESNKRNRTLLEDLRRKLRESEERNRRLLRKLEEDAR

SEQ ID NO: 24595 - protein, 60 aa, Artificial Sequence
  Synthetic
SEAEEALKKVEELVRRVEEEIKRVDERSKDLVRRVERKLEELVERSKELVKRLLDMRRRG

SEQ ID NO: 24596 - protein, 55 aa, Artificial Sequence
  Synthetic
EDVERRVRELIERLKRKLEESNRRNKKLIDELRKRLEEVKRENEKLNEDLERETK

SEQ ID NO: 24597 - protein, 60 aa, Artificial Sequence
  Synthetic
DELERVLKRVKELIDKSRREDEELDERSKELVKKVLDELKDALRKIEKLVRDLKEMTDRG

SEQ ID NO: 24598 - protein, 55 aa, Artificial Sequence
  Synthetic
EEVRKDAERLIRENEEDNRRSNERNKKILKELKDALDRVKEEVRKLIRRLEEEAR

SEQ ID NO: 24599 - protein, 60 aa, Artificial Sequence
  Synthetic
SEAETVLEEVKKLVERSREEDKEVDDESRELVERVEEKLRRVLKKSKEDVDRVMRLIEEG

SEQ ID NO: 24600 - protein, 55 aa, Artificial Sequence
  Synthetic
EEVEDTIRRLIEENKKRNEESNRRNRELIKKLERKLEEVKRRNEDLNRKLEETAR

SEQ ID NO: 24601 - protein, 57 aa, Artificial Sequence
  Synthetic
STLEEAEEEVRRLIKRTEDETRRVADEVKKLLDKHRRATEDVEKKVRELLDRLKKDE

SEQ ID NO: 24602 - protein, 59 aa, Artificial Sequence
  Synthetic
DREIEKIVRRAKETNEENREIIERILKEIKELIDDANRKLKEILDRIRELVETVKRKAK

SEQ ID NO: 24603 - protein, 57 aa, Artificial Sequence
  Synthetic
STLEEVERRIRELLDRHRRATEEVEKEVDRLNKETRDELDRVRKEIEKLLKDLDRKE

SEQ ID NO: 24604 - protein, 59 aa, Artificial Sequence
  Synthetic
DEELRRILKRVEKLVKDLNDKLRKILDDARRSNEEIKRRLEEILKEVKRLVDTVTERAR

SEQ ID NO: 24605 - protein, 58 aa, Artificial Sequence
  Synthetic
SRIERAEEELKRSLKELREDLERVVRTIRKILREHEEKSKDVKRRIEELLREVKKRMV

SEQ ID NO: 24606 - protein, 56 aa, Artificial Sequence
  Synthetic
VDKVLRDVEDLNRTTLKLLEDLLRTVEEVVRRADKLLEDLLREIKRLVDEVMERDR

SEQ ID NO: 24607 - protein, 58 aa, Artificial Sequence
  Synthetic
SEIEEIEKEIRKSVEEVKKTLDKVVTEIRKSTREHEKKSEEVRKRSKELNKDLRDRLV

SEQ ID NO: 24608 - protein, 56 aa, Artificial Sequence
  Synthetic
VKTVLDDVRRVNEETKKRIRDLLEESKRSDEEADRRAEELLERNERLVRKVAEEAR

SEQ ID NO: 24609 - protein, 58 aa, Artificial Sequence
  Synthetic
SRIEEVIRRAREILEDHRRKSTEVRERLKKLLKEHEDKSRRVKEESEKINRDVKRELV

SEQ ID NO: 24610 - protein, 56 aa, Artificial Sequence
  Synthetic
VDKVLKEIEDLVRKADELLRELLKRVEDLVRRADEVLEELLRRNRKLAEDVMRKDK

SEQ ID NO: 24611 - protein, 58 aa, Artificial Sequence
  Synthetic
REIEEVEKEIKKLLDEHRKKSDDVVRKLEKILRDHERRTEDVKRESEKINREVEKRKV

SEQ ID NO: 24612 - protein, 56 aa, Artificial Sequence
  Synthetic
VDEVLERVRELLERADRKLEELLERVRKLVEDANRVIEEVLERNKRLADEAMKKDK

SEQ ID NO: 24613 - protein, 58 aa, Artificial Sequence
  Synthetic
SRIEEIVKRIRDILKEHEDKSRRVVEDIKRSTEELKRALREVVERIKTILDDVRRRLV

SEQ ID NO: 24614 - protein, 56 aa, Artificial Sequence
  Synthetic
VDKVLEDVRRVAKEADDRLEELLERSKKLNKETLDELERLLREVEELVKEVAERDR

SEQ ID NO: 24615 - protein, 58 aa, Artificial Sequence
  Synthetic
SRIEEVSERVREILRRHEEKSREVVERIKKSTKELRDEVRKVRATSKEINDDVRRRLV

SEQ ID NO: 24616 - protein, 56 aa, Artificial Sequence
  Synthetic
VDRVLERVEKMVRDADKRIDEVRKESERLNEETRRRIERLLRENKKLADEVAERAR

SEQ ID NO: 24617 - protein, 58 aa, Artificial Sequence
  Synthetic
SRIERVEERMRELLDRHRETSKRVVEEIRKSTEEHKEKSERVVRESERLNREVERELV

SEQ ID NO: 24618 - protein, 56 aa, Artificial Sequence
  Synthetic
VDRVLEEVERLVTEVNREIKELLERSKRSDKEADRRLEEVVKTNRELAERVARRAT

SEQ ID NO: 24619 - protein, 58 aa, Artificial Sequence
  Synthetic
SEIEEVVRRLEELVKRVAEELKRVVDRIEDLLREHKDKSRRVEERSKEINEDVARRLV

SEQ ID NO: 24620 - protein, 56 aa, Artificial Sequence
  Synthetic
VKEVLERVKKLVDDLIRRLKKLLEDLKKLVDDADEEIKRVLEENEELARRAAERDT

SEQ ID NO: 24621 - protein, 58 aa, Artificial Sequence
  Synthetic
SEIEDVVRRARELLERLRKRVREVVEDIRRSTEEHKEKSERVVKTSEELNKRLEDELV

SEQ ID NO: 24622 - protein, 56 aa, Artificial Sequence
  Synthetic
VDKVLEDVRRLVKEAVDRIDKILRDSRESDRRADEEIKKVLDRNRELVKKVADEDT

SEQ ID NO: 24623 - protein, 58 aa, Artificial Sequence
  Synthetic
DEIERVEEEIRRLLEEHKKRSDEVVRRLEKLLKDHKEVTRKVVEESERINRDVERRLV

SEQ ID NO: 24624 - protein, 56 aa, Artificial Sequence
  Synthetic
VKEVLERIRKLVKDVNKRLEEILEEVERLVRRANRRIEELLERNRRLVEEVARRDE

SEQ ID NO: 24625 - protein, 58 aa, Artificial Sequence
  Synthetic
SEIEKVEEEIRRILEEHKRISDEVKRRVRKSTEEHEKRTEDVERRSREINEEVEARLV

SEQ ID NO: 24626 - protein, 56 aa, Artificial Sequence
  Synthetic
VEEVLRRIRKLAEEVNKELKRLLDESKESDDRLNKRLTEILRENEELARDVARRVK

SEQ ID NO: 24627 - protein, 58 aa, Artificial Sequence
  Synthetic
SKEERIEEALRDLVRRHKEVSRRVVETIKDLAKKLEEKLRRVETDSKRINDEVRDKLV

SEQ ID NO: 24628 - protein, 56 aa, Artificial Sequence
  Synthetic
VERVLEEIKKLVEEVNRELRELLKRIEELLKRAEEMLERLLRENRRLVEEVARRDK

SEQ ID NO: 24629 - protein, 60 aa, Artificial Sequence
  Synthetic
SESEELDKEIDDIVREDEELNKELRKRNDDAVRRVEKVIEDLLRRNEDAAEKVKKLLEEL

SEQ ID NO: 24630 - protein, 55 aa, Artificial Sequence
  Synthetic
RELLRKLREILEDLRRKNERTEEESEEILRRLTKLAEEVLRRSRKILEDLREALR

SEQ ID NO: 24631 - protein, 60 aa, Artificial Sequence
  Synthetic
SEKDELRKRMRDISKENKELLEKLEREIRELSKENEKLNEKLRRELEELRKTIKDLLDRL

SEQ ID NO: 24632 - protein, 55 aa, Artificial Sequence
  Synthetic
RELLKEAKELLEENRKRNEEILRRAEKVLRDNAEKDKRTLEKVEEILDRLRRELT

SEQ ID NO: 24633 - protein, 60 aa, Artificial Sequence
  Synthetic
KEAEDLEREMREISDRNRKLNKKLRRDIKEISDDNRRLLEELRRRLKKMEEDVRRLLEEL

SEQ ID NO: 24634 - protein, 55 aa, Artificial Sequence
  Synthetic
RELLTEARKLLERNREEDKKSLDDARKALKENKEENDKIKEEIDKILRELEEELR

SEQ ID NO: 24635 - protein, 60 aa, Artificial Sequence
  Synthetic
EESERLAKRVDDLSRENEELNKRLRDEMEKISRENKELLKDLRRKADKIVKDVERLLEEL

SEQ ID NO: 24636 - protein, 55 aa, Artificial Sequence
  Synthetic
RELTRRIEKLLKDNTDRDKKSEDDLRELLKENKKRNDEILEEIRRILEELRKKLT

SEQ ID NO: 24637 - protein, 60 aa, Artificial Sequence
  Synthetic
SLDKEIERKVEEIERRLKESNDRLREKVDEIRRRSERLNTELNERVDRIAERIRRMKRDG

SEQ ID NO: 24638 - protein, 55 aa, Artificial Sequence
  Synthetic
ERLEEKIDRIIRELERRNDKSREELEKIIRELRERTKESEKRLEDIIRELEERTR

SEQ ID NO: 24639 - protein, 60 aa, Artificial Sequence
  Synthetic
DADKRLRTDVRRIVEDLKRSNEELRRRSEEIAKRSDKLNKELNKKSKEIEERVKRMRDEG

SEQ ID NO: 24640 - protein, 55 aa, Artificial Sequence
  Synthetic
KDLEKELRDIIRELRERNRESEEEDERIIRELEKRTKDSEKRDDEILRELEREIR

SEQ ID NO: 24641 - protein, 60 aa, Artificial Sequence
  Synthetic
SLVEKIAREVRKIKEDSKRLNDELNEKVRKAVEDLERSNRELEKRVREIEERVRRAETEG

SEQ ID NO: 24642 - protein, 55 aa, Artificial Sequence
  Synthetic
KELEDDIERIIKELEELTRRSEEKLRETIERLEERNKETAERLERIIKELEERSK

SEQ ID NO: 24643 - protein, 60 aa, Artificial Sequence
  Synthetic
KEAEELEERVKRIEEESRRLNRELNEKVKDIAKKLEDSNDKLRKDSEEIAERVKRARTEG

SEQ ID NO: 24644 - protein, 55 aa, Artificial Sequence
  Synthetic
DEVVKKLEDIIREIEKTTRESEKRLEDIIRKLKKKNDDTEREDREIVKRLREETK

SEQ ID NO: 24645 - protein, 60 aa, Artificial Sequence
  Synthetic
SLLEKLERDVERLSEEDEKLNEDVRRVDREIVERDKKLNREVNERVKRLAEEVKDIRRRV

SEQ ID NO: 24646 - protein, 55 aa, Artificial Sequence
  Synthetic
ERAEERLRRIIKRNKEENERTAKESRDSIEELKERNERSKRRLEKILEDLERETR

SEQ ID NO: 24647 - protein, 60 aa, Artificial Sequence
  Synthetic
REAEELEKRVRKIEREDDKLNEELNRRAKDVSREDKELNDRVREVVRRLVEEVDRIRRDV

SEQ ID NO: 24648 - protein, 55 aa, Artificial Sequence
  Synthetic
EELEKKLEDIIRELKKRNDESAERIRRLIKTNEDENRRTAEEIKKILDDIRRKVK

SEQ ID NO: 24649 - protein, 59 aa, Artificial Sequence
  Synthetic
SELEEIRKKIDDLRRRVEEINERITREDKRLVDELKEINKRITDRVRKIARDVEELLRK

SEQ ID NO: 24650 - protein, 60 aa, Artificial Sequence
  Synthetic
DEERLRTVDEEVKKILDELREKLDRNRRRSEETNRRLDELLKENARRVEEIIRRLREEVK

SEQ ID NO: 24651 - protein, 59 aa, Artificial Sequence
  Synthetic
SELEEIKKRVEEIARTLEKLNRDITKLDEDLAREVEDINRRITETVEEIAKRVERLREK

SEQ ID NO: 24652 - protein, 60 aa, Artificial Sequence
  Synthetic
DKERLDKLRTEVKKIMDDLRRILEKNAKDSKRSLDRLRKILEDNKEKVKRIADRLREAVR

SEQ ID NO: 24653 - protein, 59 aa, Artificial Sequence
  Synthetic
KDEKRIKDVLKKLEDDNKKLNDEIKKLNEEIARKNEELNKRIEDMIRKAEREVDELKRN

SEQ ID NO: 24654 - protein, 55 aa, Artificial Sequence
  Synthetic
KEVDDEARRILEKLRRENERTKEESKEINEELEKRNRESVERIKEILRRLEEKLR

SEQ ID NO: 24655 - protein, 59 aa, Artificial Sequence
  Synthetic
SEVERLLREVEKVLRRVVKRSRDLNEELKKRSKEHKETSERLNREMKRVLREVEKKIDE

SEQ ID NO: 24656 - protein, 55 aa, Artificial Sequence
  Synthetic
REVKKRLDELLKRLEREVRESEKRMDRSHEDVRREAERSKKELEELLKKLEDKVR

SEQ ID NO: 24657 - protein, 60 aa, Artificial Sequence
  Synthetic
SEVEKILRDVEDATRRHKRTSEELNRRLEEVVRRVKEESKELNERLREVVKRVKEEIRKT

SEQ ID NO: 24658 - protein, 55 aa, Artificial Sequence
  Synthetic
REVKKRIDELHDDLRRVMEASKERIDRILEDLRRVVERSKEELRKLLEDLKRTVD

SEQ ID NO: 24659 - protein, 59 aa, Artificial Sequence
  Synthetic
SEVEELLKRVEEATERHKREIERLEDEIRKVLEDVDKRSKELNDHNRDVIEKIRERIER

SEQ ID NO: 24660 - protein, 55 aa, Artificial Sequence
  Synthetic
REVKTELDKLHEDLKRTAEEVKKRLDDLLKELEKKVEESKTEIDRSLEELEKTAR

SEQ ID NO: 24661 - protein, 57 aa, Artificial Sequence
  Synthetic
DEERRVKEELEKLLEDLRRTIKKVEEDSDRINKDLERVIRRSEREADKILEDLERAG

SEQ ID NO: 24662 - protein, 59 aa, Artificial Sequence
  Synthetic
EEKLRELLERAKKLVEDIKRRLKELLDRHRDLVRRIKERSKELNKRLKDLIDEIKERAR

SEQ ID NO: 24663 - protein, 56 aa, Artificial Sequence
  Synthetic
SSKDDLRRKIEKLLRDLERVIRESEKRSEEINRDLERTLKRIKEEADKILDKVRRG

SEQ ID NO: 24664 - protein, 59 aa, Artificial Sequence
  Synthetic
DRLLEKLLRELEKLIRRIEEESRKLNEEHEKLLKRIKDELKKLLDDLRRLAREIEERRR

SEQ ID NO: 24665 - protein, 57 aa, Artificial Sequence
  Synthetic
KSTEDAKREIDKLLEELEETIRRAEDRSRRLNEDLARTLKRIEEELKRINEEVEKRG

SEQ ID NO: 24666 - protein, 59 aa, Artificial Sequence
  Synthetic
DELLKKLLDELRELIDRIRRDLERLLREHEELIERIKRTLEELLRRHRELVKRIEETAR

SEQ ID NO: 24667 - protein, 57 aa, Artificial Sequence
  Synthetic
SEEDRLEEEIKRILDDVARVVKRIKEELKRINDELKKVIDESRDHARRVNDDVRRRG

SEQ ID NO: 24668 - protein, 59 aa, Artificial Sequence
  Synthetic
EELLKELLKRLEELARRIKKKLEELLREHEKLLEEIEKALRRSNEEHRKLVEKIKRDAT

SEQ ID NO: 24669 - protein, 57 aa, Artificial Sequence
  Synthetic
DEEERVKEAVERLLRDLERAIKESEDHLRRLNEDLDRVIRESKEHLKKVNDDVRRAG

SEQ ID NO: 24670 - protein, 59 aa, Artificial Sequence
  Synthetic
EELLKKLLEELKRLIERIKRDLKRTNDEHEKLIREIKKRLEDSNRDHERLVKDIKETAR

SEQ ID NO: 24671 - protein, 57 aa, Artificial Sequence
  Synthetic
SKEDRLREELKKLLKRLREEIERLKRALEESNKDLKRTIDRSEKHLRDVNEDVKRAG

SEQ ID NO: 24672 - protein, 59 aa, Artificial Sequence
  Synthetic
EEELDKLLKEARDLIREIEKRLEELLKRVEKLTEDAKRDLERSNREHKELADRIKETAR

SEQ ID NO: 24673 - protein, 56 aa, Artificial Sequence
  Synthetic
SEAERIEEEARRLLEELRRAIERVKEEADRLLEELRDAIRKSKEHLKRLNEDVERA

SEQ ID NO: 24674 - protein, 59 aa, Artificial Sequence
  Synthetic
EEALKRLLEKLKRLIEEIKRELKRLLDDLKRLIDEIAEALKRSNDRHEELVRRIKEKAR

SEQ ID NO: 24675 - protein, 57 aa, Artificial Sequence
  Synthetic
DSKEEIRRKIDELLKRLEETIRRSEEHFRRSLDDARKELKRSRDHVRKVNKELRDRG

SEQ ID NO: 24676 - protein, 59 aa, Artificial Sequence
  Synthetic
DEELERLLRDLERLIREIEKTLEDTNRSNEELVRRLKRRLEESNKRHEDLADEIRRRTD

SEQ ID NO: 24677 - protein, 57 aa, Artificial Sequence
  Synthetic
SEEDRIREEMEEILRRVERTVEEIKKELKKINDDVDRTARESEKHVREVLERVEREG

SEQ ID NO: 24678 - protein, 59 aa, Artificial Sequence
  Synthetic
EELLEKLLEDLKRVVEKIRRDAEDLLERHKDLVRRIKEELRRSNRKLEDLVKKISERAT

SEQ ID NO: 24679 - protein, 56 aa, Artificial Sequence
  Synthetic
DEDREVRRTLEELLDDLRRVIEESERHLEKLNEDVREAIRRSEEHVRRVLDRVRRG

SEQ ID NO: 24680 - protein, 59 aa, Artificial Sequence
  Synthetic
EDLLRKLLEEAKRVLDEIRKTLKKTNEDHERLVERIKRELEKSNKDLERLAKEIIDRDK

SEQ ID NO: 24681 - protein, 57 aa, Artificial Sequence
  Synthetic
SSKEDITKKIEELLRELEEELKKSEKHLRELNEEAKRTAEESRRHLEESLRKVEKDG

SEQ ID NO: 24682 - protein, 59 aa, Artificial Sequence
  Synthetic
DEELKKLLKELEDLVKEIKERLRKTNEEHRKLVEEIKERLKRSNESNERLVRRIEEEAR

SEQ ID NO: 24683 - protein, 57 aa, Artificial Sequence
  Synthetic
SELERAEEEIEKLNRDLKRTLDEIRDRIRKINDDLRKTLRKSDEDSKRLLKELRDEV

SEQ ID NO: 24684 - protein, 58 aa, Artificial Sequence
  Synthetic
EKLKDMLDKHRKLIDDLKRRLERRLREHKRLLDEIEKRLRDSLKRIEEIVREILERAR

SEQ ID NO: 24685 - protein, 57 aa, Artificial Sequence
  Synthetic
DELERIRRELERINTTLDELLKRSKEETDRILKKVEDSIREVEKKVKELLEELKRRV

SEQ ID NO: 24686 - protein, 58 aa, Artificial Sequence
  Synthetic
ELLKKILDEHRDLLRRIEEELRRSLEDIKRVAKEVEERIKKVLDELRRLIEELLRRAK

SEQ ID NO: 24687 - protein, 60 aa, Artificial Sequence
  Synthetic
SVLEEAEKELRKIVEDNRRTLREVKERNKKLNKENRDTIKKIEDDVRRIIRELKEDLKRS

SEQ ID NO: 24688 - protein, 59 aa, Artificial Sequence
  Synthetic
EEDLRRLEEEIRRRSEENKKRIRDLLRRSEELSRRDKKKLKEILERIKRLADEVREKIR

SEQ ID NO: 24689 - protein, 60 aa, Artificial Sequence
  Synthetic
SDLEDILRKIEDLSRKNEEELKRVLEENKKLSDDDKRRLEKILREVEKKIRKIKKDIKDE

SEQ ID NO: 24690 - protein, 58 aa, Artificial Sequence
  Synthetic
EEVRKLEEDVRRIIERNKKLTEDLARELKKLNDDNERTLRKVEEDIRRIIADLRRTLK

SEQ ID NO: 24691 - protein, 60 aa, Artificial Sequence
  Synthetic
SELDEILERLRRLSEENKRRIEEALRRNKKLSEDDERLSREIRRRVRELVEEAKEVLRRE

SEQ ID NO: 24692 - protein, 58 aa, Artificial Sequence
  Synthetic
EEVKRVAEELDKLVKENRRVTEKVARELKKLNDKNREVNERLERELDKIIKDLRRTDK

SEQ ID NO: 24693 - protein, 60 aa, Artificial Sequence
  Synthetic
SEIEKILEDVKKLADDLRRTLKRALEENKELSDRDKEELRRILEEIKKLAEEIDKLIKEE

SEQ ID NO: 24694 - protein, 58 aa, Artificial Sequence
  Synthetic
ERVREVARRIEKIIEDLRRDLERVRRELKKLNDDNRRVLEEVKRTVEEIIKRLRESAK

SEQ ID NO: 24695 - protein, 60 aa, Artificial Sequence
  Synthetic
DEVDELLKEAEEVIREVTREHKRLLDEARKISEENKKRSEESNREVRELVRRIKEEIKKG

SEQ ID NO: 24696 - protein, 59 aa, Artificial Sequence
  Synthetic
SEKAKRVEEELKKLLDKLSRITEEVERRLEELLKDNERVSRESDEELKRILEDVERDTR

SEQ ID NO: 24697 - protein, 60 aa, Artificial Sequence
  Synthetic
SEVEELLDRLRKLIEDVVREHKRLLDEVRRISRENEELIRRLLEKVEEVIRRIKERIKSG

SEQ ID NO: 24698 - protein, 59 aa, Artificial Sequence
  Synthetic
EKTAREAEEELRRLLERLSEVTRKVEKAIEDILRRNRETSERVAREIRRLLKELEDTAR

SEQ ID NO: 24699 - protein, 60 aa, Artificial Sequence
  Synthetic
SSVEELLERLRRISEENKRRIEKLLREVEKVLRELKDRHRKLLKRVEEIIRKVKEEIKSG

SEQ ID NO: 24700 - protein, 59 aa, Artificial Sequence
  Synthetic
RETAERARETLKRLLDENRDRSKKVKEEIRRILEDLTRTTERVKREIKKLLKELEDTAR

SEQ ID NO: 24701 - protein, 55 aa, Artificial Sequence
  Synthetic
DLLRKLLEEAKKILKEIKDAHEKLLRELEESNKELEKAHRKLLEDAKRMLDDLKR

SEQ ID NO: 24702 - protein, 59 aa, Artificial Sequence
  Synthetic
EDRVRDLRRALEELIKESDEVSRRLKEEIDRSLESSKKVSRDLEEELKKLIKDLEDTRR

SEQ ID NO: 24703 - protein, 55 aa, Artificial Sequence
  Synthetic
SELEKLLRDDRELLKELKKAHKKLLDELKESNDRVRKRHEELLRRIREIAKRLRD

SEQ ID NO: 24704 - protein, 59 aa, Artificial Sequence
  Synthetic
KDKVRRVERESKKTHDESREVSEKLRRDAEDSLRSSEKLSEDLERELRKLIKEVRDEAK

SEQ ID NO: 24705 - protein, 55 aa, Artificial Sequence
  Synthetic
KDIERLLEELKRILEDLKRKHKRLLERLEDSNRRIRRTLEELLKRLEKLVKDLSD

SEQ ID NO: 24706 - protein, 59 aa, Artificial Sequence
  Synthetic
KDKVDDAKRRLEELLKESREVSKKLRDDIERSIRSLREEVKKLDEDAKRLLDKVREEIR

SEQ ID NO: 24707 - protein, 55 aa, Artificial Sequence
  Synthetic
SVLEDLIRRDREMLKRAKEEHDRLRKEIERSNREIDEEVKRLLAEIKKIVEEVSK

SEQ ID NO: 24708 - protein, 59 aa, Artificial Sequence
  Synthetic
KKAVDEVRKESDDTHKESEAVSRDLKRELERSIKSLEKRIREAEEELKRILKELEDEKR

SEQ ID NO: 24709 - protein, 55 aa, Artificial Sequence
  Synthetic
EELERLLEEDKELVRRVERELERLLRELKRSNDEIKKTLEDLLRRIEEILKEIRR

SEQ ID NO: 24710 - protein, 59 aa, Artificial Sequence
  Synthetic
KEKVKRAEDRSRETHRRLEEVVKKLKEDAERSIKSLEELVDKLRKELRRLLEEVREEVR

SEQ ID NO: 24711 - protein, 55 aa, Artificial Sequence
  Synthetic
RELEELIKEDEDLLRRLAETLKKLLEDVRRSNEELRKFHEDLLRDLERLLEELRN

SEQ ID NO: 24712 - protein, 59 aa, Artificial Sequence
  Synthetic
KEKVRRVEERSRRTHKELEDLAREVDKELKKSIKSSRDVTRKVKEDADRLLKKVADDTK

SEQ ID NO: 24713 - protein, 55 aa, Artificial Sequence
  Synthetic
SILETLADRDRDMVRRVKEALKKLLERDKRALERLKRVHKELLDRLRKILEDLKR

SEQ ID NO: 24714 - protein, 59 aa, Artificial Sequence
  Synthetic
EEKVKRVEEESRRTHKELKDVADRVETESDKSHEESKKVTDEVRKELERLLRELEETVR

SEQ ID NO: 24715 - protein, 55 aa, Artificial Sequence
  Synthetic
SEAEKLLRELEDILKKLKDALKRLIEEDERLLKRLKREHEKLLKRLEEVLRELKK

SEQ ID NO: 24716 - protein, 59 aa, Artificial Sequence
  Synthetic
REKVKRVKDEADRLLKELEDVVREVKKRSDESHKRSRDVTREMKKELKRLLEELEKTVR

SEQ ID NO: 24717 - protein, 55 aa, Artificial Sequence
  Synthetic
SELERLLREDEEMVERVERVLKELEEEVRKALKRAKEMHRRLLERLKTILDELER

SEQ ID NO: 24718 - protein, 59 aa, Artificial Sequence
  Synthetic
KEKVKELERRSRKTHKELADKADTLRKRLEEVIKESEDVTEELERRLKKLIDDLRRSVT

SEQ ID NO: 24719 - protein, 55 aa, Artificial Sequence
  Synthetic
SELEKLLRELEELLKELKRVLEELIERDKRLLDRLKEVHERLLRRLEKLLKELKD

SEQ ID NO: 24720 - protein, 59 aa, Artificial Sequence
  Synthetic
EDKVREAKRELERLIEELRRAVRRVEDESRRSHEESKKVTDDLDKRARELLEELRETIR

SEQ ID NO: 24721 - protein, 60 aa, Artificial Sequence
  Synthetic
REVEELEKDVRRTLDELRKRHRDNNERIKKILRELEDLHRRNNERTKTLLARIRELRERG

SEQ ID NO: 24722 - protein, 55 aa, Artificial Sequence
  Synthetic
RELERKLKELVKDVEKVIEDDDRSADKLLTKVKRDADEDRKSNEKLVREVREELR

SEQ ID NO: 24723 - protein, 60 aa, Artificial Sequence
  Synthetic
SEAEEVLKRVEEVVERLKKLHDDNNKKLRDAVRRLKRLHTEHNKETKEIKKEIEDLIRKG

SEQ ID NO: 24724 - protein, 55 aa, Artificial Sequence
  Synthetic
REVEKRLKEVVKRIDEVAEEDERSIREILRELRKVIEDDERSNRKVAKEIRESAK

SEQ ID NO: 24725 - protein, 60 aa, Artificial Sequence
  Synthetic
DKVREVLERLKKLVEDLKRLHKRNNEEVRRVIEEIKDRSRRNNKRTEDILRDIEREIRRG

SEQ ID NO: 24726 - protein, 55 aa, Artificial Sequence
  Synthetic
ERIKEELKKLVEDVRRTAEDDRRTIEDLVRKVEEVLERDRKSNEEAARDVDRKLK

SEQ ID NO: 24727 - protein, 56 aa, Artificial Sequence
  Synthetic
RSVEEVKKELDDSDRRDREVVKEARRRLEESKDRLRKIIERAKEELDKSDERIKKN

SEQ ID NO: 24728 - protein, 59 aa, Artificial Sequence
  Synthetic
DEELKKLLKHNREVLEDSRRKIEELLRTNEKALEDVKRAIEELLKHNEEVLKEVDDRTR

SEQ ID NO: 24729 - protein, 56 aa, Artificial Sequence
  Synthetic
KEVEDAEKRLRDLLKEDRELIERLRRALEESLKEDRKVIKELREELDKSDRKVEED

SEQ ID NO: 24730 - protein, 59 aa, Artificial Sequence
  Synthetic
REDIKRLLEELEEVLRRSEKKLRELLDTNRKILEESKERLRRLLEHNKRVLRRVVEETR

SEQ ID NO: 24731 - protein, 56 aa, Artificial Sequence
  Synthetic
SDEERVEKELKKSDDEDKKLIDELTRRLRESLKRLEEEVRRAREELDKSDEEVRKA

SEQ ID NO: 24732 - protein, 59 aa, Artificial Sequence
  Synthetic
REDIERLLDHNRKVLEKSADDLRKLLKTNEEILRRVAKAIRDLLEHNRRVVEEVKERAR

SEQ ID NO: 24733 - protein, 56 aa, Artificial Sequence
  Synthetic
SEVEEAKRRLDESDKDDRRVIDKLRKELEKSREEAKRLIDRLREELKDSNREAEEA

SEQ ID NO: 24734 - protein, 59 aa, Artificial Sequence
  Synthetic
REDLRRLLEHNKEVLERSKKRLEELSETNKKFLEEVKDALRELLKTNREVLREVKERTK

SEQ ID NO: 24735 - protein, 56 aa, Artificial Sequence
  Synthetic
SSVERAKRELDKSLKEDRDTIRDLKRRLEESRKRDREVIEELKKILKKLLDEVKDS

SEQ ID NO: 24736 - protein, 59 aa, Artificial Sequence
  Synthetic
DDKIKKLLDHNRKVLEDSKEELRRLLETNKRILEESKKRLDRLAEEIEKVARTVKEEAR

SEQ ID NO: 24737 - protein, 56 aa, Artificial Sequence
  Synthetic
DEVERAEEELRKSDEEDRRVVKRATETLKKSKDELEREIKRLEDELERSNREVEER

SEQ ID NO: 24738 - protein, 59 aa, Artificial Sequence
  Synthetic
REEIKKLLDHNRRVLEESERRIRELLRTNREVLERVKKELDELLEHNRRVLEEVEKRVR

SEQ ID NO: 24739 - protein, 56 aa, Artificial Sequence
  Synthetic
SSVEKAKKRLDESDKTDRDVIKRLREELKKSEDTDRELVKKVKEEIEKVEEELRRR

SEQ ID NO: 24740 - protein, 59 aa, Artificial Sequence
  Synthetic
DDKIRRLLEHNEEVMKRSKERLDDLVRTNRKILEESKRKIEKLLKELREVVEEVDRRAR

SEQ ID NO: 24741 - protein, 56 aa, Artificial Sequence
  Synthetic
DKAERVREEIEKLERELRRVLKESREHTKKLEEDLERVLRRSREATKKLKEDLERN

SEQ ID NO: 24742 - protein, 58 aa, Artificial Sequence
  Synthetic
ELIKRMLEELKRLLEELEKRIRDSNAELEKLLRDLIRKLERSLREIKRVLEELKEEAR

SEQ ID NO: 24743 - protein, 60 aa, Artificial Sequence
  Synthetic
SEVETLMREIKKLIDDIKRKNEDSNREIREVSRKTEEDLRDLLRKAREVAEKLKDELRRR

SEQ ID NO: 24744 - protein, 59 aa, Artificial Sequence
  Synthetic
EEKVKRLEDSLERLKRDLRKIIKENEDELRKINRRNEELIKKAEEDLRRLSEDLKRAEK

SEQ ID NO: 24745 - protein, 57 aa, Artificial Sequence
  Synthetic
SELEEVLRRIEKLVRKAHKENEDVLREIERLVRTAHRLNKKVDDDSAKIAEDLKREK

SEQ ID NO: 24746 - protein, 58 aa, Artificial Sequence
  Synthetic
ERVRRLKEILERLKEEVRRSLEELRKEVERLKKEVEDSLRELKKSLEEWVKDLEEATR

SEQ ID NO: 24747 - protein, 57 aa, Artificial Sequence
  Synthetic
SDLEAVLDEIKKLAEEAHKRNEEVDKESAKLVKEAHKVNEDVDKESAEIVKRIDEEK

SEQ ID NO: 24748 - protein, 58 aa, Artificial Sequence
  Synthetic
ERVKRLKDELRRLLKEVKDSLEELDRMLEEWKERVRRSLEELRKRAKEWEDKLRESLR

SEQ ID NO: 24749 - protein, 57 aa, Artificial Sequence
  Synthetic
SELEDVLKKIRKLVRDAHEENKRVLEEIRKTVDEIRKELEDVDTKSAEIAERAKERK

SEQ ID NO: 24750 - protein, 58 aa, Artificial Sequence
  Synthetic
ERVERLRRELEKLVREVEESLKRLKEELDKIKEELRRILEELEEKLRRWSRELKETAR

SEQ ID NO: 24751 - protein, 58 aa, Artificial Sequence
  Synthetic
SELEKVVEDLRRIVEEIERRLREVIKEIRELVRRAHERNKDVDRKSAEIVKDIEEKKK

SEQ ID NO: 24752 - protein, 58 aa, Artificial Sequence
  Synthetic
ERVERLKRALDELERRLKELVRELEDSLKKLADEVKRSLEELDKSLKDWKKKLDDELK

SEQ ID NO: 24753 - protein, 57 aa, Artificial Sequence
  Synthetic
SEIERVLEEIKERVERADRKNEKVDRESAEKVKELHRRNEEVDRESAETVKRAERDK

SEQ ID NO: 24754 - protein, 58 aa, Artificial Sequence
  Synthetic
DKVREIRERVERLVKAVDESLERLERSLEEWARRLDKSLEDLKRSLKRWKEELDRKAQ

SEQ ID NO: 24755 - protein, 57 aa, Artificial Sequence
  Synthetic
SELETLIKEATDLAEEVKEDLRRVDEESAKLVEDADDENKRVDEESAKIVEDLKREK

SEQ ID NO: 24756 - protein, 58 aa, Artificial Sequence
  Synthetic
ERIRDLKEKVRRLMEDVKRLLEELERSLERWKEKVRDSLEKLKKSLEEWAKELKDTSK

SEQ ID NO: 24757 - protein, 57 aa, Artificial Sequence
  Synthetic
KDLETVLEEIKRIVDDLDRRNKEVDKESAKLVKEADEKNKRVDEESAKIVKRLEREK

SEQ ID NO: 24758 - protein, 58 aa, Artificial Sequence
  Synthetic
DRVRRLREEVTKLLDEVRRSLDRLRESLKEWKERVDDSLRRLRDSLRKWKRKLEEATR

SEQ ID NO: 24759 - protein, 57 aa, Artificial Sequence
  Synthetic
SELDDLLRRIRELVRRAEEDLKRVNEESARLVEEMDKDNKRVDEESAKIAEDLKREK

SEQ ID NO: 24760 - protein, 58 aa, Artificial Sequence
  Synthetic
KKIEELKREVKKIADELERILKELEDSLREWSERVRKSLEELKDSLRRWAEELKRDLK

SEQ ID NO: 24761 - protein, 57 aa, Artificial Sequence
  Synthetic
KDLERVVKEIERLVREAEKKIREVNDRSAKLARDLDRRNREVLKEIKKIAEDLEREK

SEQ ID NO: 24762 - protein, 58 aa, Artificial Sequence
  Synthetic
ERVERLKRELERLKRELEETLKRLDEELEKWEERVRESLKRLEDRVREILKRLEDDAR

SEQ ID NO: 24763 - protein, 57 aa, Artificial Sequence
  Synthetic
DELETVMKRIRELAKELNKKNKDVLDEIEDLVRKADKRNKEVLKRIEEILREARKRK

SEQ ID NO: 24764 - protein, 58 aa, Artificial Sequence
  Synthetic
ERVKRLKDELRRLIEEVRRNLKRLKEEVDKIRERVRRSLKKLKEDVKRLSDEVKETLK

SEQ ID NO: 24765 - protein, 60 aa, Artificial Sequence
  Synthetic
KEIEDLLRELRELVKEIDDLIKDATREIERLVKEVHDKNEKVTRRLEKLMRELREVARRG

SEQ ID NO: 24766 - protein, 58 aa, Artificial Sequence
  Synthetic
ERIETLERALRELVRELEEKVDEHRKRTDKVARDLKKSVDDHRRRTEELVRELRKTEE

SEQ ID NO: 24767 - protein, 60 aa, Artificial Sequence
  Synthetic
SELEDVLRRAKKLVEDVHRDNKRVTEELEKLARELHKKNEDVLRELKKLADDLREMLKRG

SEQ ID NO: 24768 - protein, 58 aa, Artificial Sequence
  Synthetic
EKVKRLEEEIRRLARELRESVRRHKERTEELVERLKESLKKLEEDIRRLEKELEDDRR

SEQ ID NO: 24769 - protein, 60 aa, Artificial Sequence
  Synthetic
SDLDDVLRRIRELAKRVHDENKRVTEELERLVEELEKKARELLRRIEELVRTLKEMRERG

SEQ ID NO: 24770 - protein, 58 aa, Artificial Sequence
  Synthetic
ERVERLRRELEKLVKELEESVRRHKKRTRELEERLKDVLRELEDAVRRLVEELEKTDE

SEQ ID NO: 24771 - protein, 60 aa, Artificial Sequence
  Synthetic
EEIERLLEEIKRLVETVHESNRRVLKELRDLAEELKRRNTKSNRDMERLVEELEEMRRRG

SEQ ID NO: 24772 - protein, 58 aa, Artificial Sequence
  Synthetic
EKVKTARDEVRRLVEELKESVERLARELKKLVDELRKVDEDNKRRLEELERRLRESTR

SEQ ID NO: 24773 - protein, 60 aa, Artificial Sequence
  Synthetic
SELEDVLRKLEKLAREVDKINKDLIKRVEELARELKKKNEKSNKEARDLVKKLKEMKDRG

SEQ ID NO: 24774 - protein, 58 aa, Artificial Sequence
  Synthetic
ERVRRLKKEVEELERRLRRSVDDLRRKIKELEDRLREIDERNKREIEKLVKELRDTDR

SEQ ID NO: 24775 - protein, 60 aa, Artificial Sequence
  Synthetic
DELETVAKLLEDLSRTNEDRLREVKETLKRLADTVDKINKEVLRRLRELAKRLKELKERG

SEQ ID NO: 24776 - protein, 58 aa, Artificial Sequence
  Synthetic
EDVRRLEEELRKLEERNRRLVRELEEVLKKLKDELKKSVDRLKEELDRLVKELDEIKK

SEQ ID NO: 24777 - protein, 60 aa, Artificial Sequence
  Synthetic
SEIEDALRKMEKLAEDVNRKNEEVIREVRRLSEENKKKLDDVLETLKKLVRELAEMTKRG

SEQ ID NO: 24778 - protein, 58 aa, Artificial Sequence
  Synthetic
ERIRTLEKAVRDLVRELEESVDRLRREADRLVEENERVVERLKRELKRLVEELERRAK

SEQ ID NO: 24779 - protein, 60 aa, Artificial Sequence
  Synthetic
DELREVLERVKRLVDTVNKINDDLTKRNEDLSRKNVDKIRRLTEEIERLVEEVDRARREG

SEQ ID NO: 24780 - protein, 58 aa, Artificial Sequence
  Synthetic
EDVRRLEEEVRKLVEELRRSVEDHKRRNKESVDRNRRAVEEHERRNREVVERLERKAK

SEQ ID NO: 24781 - protein, 60 aa, Artificial Sequence
  Synthetic
SDIEEALKTMEELSRRNEETLRRVLKRLKELADEVNRKNERVLEEAKELADRLRELRERG

SEQ ID NO: 24782 - protein, 58 aa, Artificial Sequence
  Synthetic
ERIKTLEEDLRRLVEENKKVVEELKRRLKKLVDELRESLKELEKAVRKLVKELRDDEK

SEQ ID NO: 24783 - protein, 57 aa, Artificial Sequence
  Synthetic
SSKETVAKRVEDVKRELEEVLKELARESKRLSDRDKKLNEEAAEEIERLKDELRKKV

SEQ ID NO: 24784 - protein, 59 aa, Artificial Sequence
  Synthetic
DEVLERIVKRVRDLVEEIKRRLEKLAEDNRRLSKRNEDVIRTLLEEARKLVEKVKEEVR

SEQ ID NO: 24785 - protein, 57 aa, Artificial Sequence
  Synthetic
RSKEEVAKEIKRLKEENKRLLDELAKRSEELERRDRRLNEEHHREIRRLTDELRKKV

SEQ ID NO: 24786 - protein, 59 aa, Artificial Sequence
  Synthetic
DRVLKEIVDEARRLSERNEEVLRRLLKENEDLSKRNEDFIRKTMKELRDLAEEVKERAK

SEQ ID NO: 24787 - protein, 57 aa, Artificial Sequence
  Synthetic
KSKEDVKREIERLKKENREVLDTARKRIEDLIREDERVNREAAEEIKRLVEELERRV

SEQ ID NO: 24788 - protein, 59 aa, Artificial Sequence
  Synthetic
DRVLKEIVEELRRLSEENKRRIERALEELEKLSKDNTDRIEEAREDLRRLVRELLEKEQ

SEQ ID NO: 24789 - protein, 57 aa, Artificial Sequence
  Synthetic
KDEEEVAKEIERLKEENDRVLKEAADKIEKLKKENREVNTRAAEEIERLKKELREKV

SEQ ID NO: 24790 - protein, 59 aa, Artificial Sequence
  Synthetic
SRVLEEVVRRLRKLSEENKKRIKEMLDDVERLSRRNEEKIRRVLEDARRLLEDLTRKAK

SEQ ID NO: 24791 - protein, 57 aa, Artificial Sequence
  Synthetic
SEKETVAEEIRRLIEKNKKMLEDHTRDIRRLEKENDDVNRKHHEDIRRLKDRLRKEV

SEQ ID NO: 24792 - protein, 59 aa, Artificial Sequence
  Synthetic
SRVLKEIVDEARELSKRNEDKIRKSLEELKRLSERNKKKIEDTLKELRKLAEEVKRRAT

SEQ ID NO: 24793 - protein, 57 aa, Artificial Sequence
  Synthetic
SEKERVADDIRKLEEENKEVLDRAAEEIKRLKKRDRELNKRHHKTIRDLVDELEKKV

SEQ ID NO: 24794 - protein, 59 aa, Artificial Sequence
  Synthetic
SRVLDEIVKEARDLSEENRKLIEEALERLRRLSRENEETIKKTMEELKRLVEEVKERAR

SEQ ID NO: 24795 - protein, 57 aa, Artificial Sequence
  Synthetic
KSKEEVADKIRKLKEENRKVLERHTREIEKLKRDDEEANKKHHEDVKEVMKRLEKEV

SEQ ID NO: 24796 - protein, 59 aa, Artificial Sequence
  Synthetic
DRVLEEIVREAEELSKRNKDRIDESLKELRKLSEDNKREIERTLEEIKRLAEEVRRRDT

SEQ ID NO: 24797 - protein, 57 aa, Artificial Sequence
  Synthetic
SSKERLKEMIDRLKERNKDLLRKAAEEIKRLEDEDREVNRRHHEEIERLKKELREKV

SEQ ID NO: 24798 - protein, 59 aa, Artificial Sequence
  Synthetic
DRALDEIIKEAKKLSDDNERLIRDVLRRARDLSRRNKETIRRTLEKLKREAEKVKEDAR

SEQ ID NO: 24799 - protein, 60 aa, Artificial Sequence
  Synthetic
SDADRIIEEARRLSEENKRRIEEVLKRNRKLSKENHDKNDELLKRVRELLRRVVERLRRE

SEQ ID NO: 24800 - protein, 59 aa, Artificial Sequence
  Synthetic
KDKLKRLEDEVRKLTDENRRVTEKAERDLRRSNRENDRSTERLEEEIRRIKKRLRDEAR

SEQ ID NO: 24801 - protein, 60 aa, Artificial Sequence
  Synthetic
REAEDLIRRLRELVRRHHELNRKLAEELRKLSEENKRKIEKVTREVEKLVKDVADTLKDD

SEQ ID NO: 24802 - protein, 59 aa, Artificial Sequence
  Synthetic
KDKLKRLEEELERLKEEVRKSNRDLEKEVRDLRKENEKVTEEVKKRIEDLKRKLDEDRR

SEQ ID NO: 24803 - protein, 60 aa, Artificial Sequence
  Synthetic
SEVDKIIKDARDLLKEHHEKNKRLIEENRRLSEENKDRIRRALEKLKKLVDDLRRLIEEV

SEQ ID NO: 24804 - protein, 59 aa, Artificial Sequence
  Synthetic
KKKLDELETEVRRIKETIDRSNERLERELEKSNRENKKVTDDAREVVKKLKEEIKRDED

SEQ ID NO: 24805 - protein, 60 aa, Artificial Sequence
  Synthetic
SEADEIIKEAKKLADDHHRLNKEIIERNKRLSEENHKLNEKIIEDVRRLVKDVAERLKRD

SEQ ID NO: 24806 - protein, 59 aa, Artificial Sequence
  Synthetic
KEKLDRLREKVEEIKRRVDKSNDELRRSMEESNKRNDESTDRLREELRRLDEELDRRRK

SEQ ID NO: 24807 - protein, 60 aa, Artificial Sequence
  Synthetic
SDLERVLKELRELVRRHHELNKDIIRRARRLSEENEKDIKKLLDDARKLLEEVKRTLDRM

SEQ ID NO: 24808 - protein, 59 aa, Artificial Sequence
  Synthetic
KKKLDEARTELRKLEEEVDKSNKELRDEVEKLERRNDELLERAREEVERLKEELRRKAT

SEQ ID NO: 24809 - protein, 60 aa, Artificial Sequence
  Synthetic
SKAERIIEEVRRLSEDNKRRIKKLLDEAKELLDRHHKRNKELLEEIERLLREVKERLKKD

SEQ ID NO: 24810 - protein, 59 aa, Artificial Sequence
  Synthetic
KDRLEELRRDLERLRKENKDVLDRVREDIKRLKEELDDSNRRLKDTIEDLKRELDEEAR

SEQ ID NO: 24811 - protein, 60 aa, Artificial Sequence
  Synthetic
SEVEELVKDLKRILDEIKRTNDELNKELKRLSDESRKLSKENIDRLRRILEEIEKTIRRR

SEQ ID NO: 24812 - protein, 59 aa, Artificial Sequence
  Synthetic
EEKVRKLEKLLEDIKRTVDKIIRESEKRAEEINRDNRRIIEENKKKLEEIARRVEELAR

SEQ ID NO: 24813 - protein, 60 aa, Artificial Sequence
  Synthetic
SSIEELAKRLEDLIRELRDRHRRLNEELKELTDRNRKEIEEANERIKRLIDDLERLRRRG

SEQ ID NO: 24814 - protein, 58 aa, Artificial Sequence
  Synthetic
EEIDKLRRELERLEEELKKVLDRTREELERLVRDNRRLNKEHKDHSDTLVRRLEESRK

SEQ ID NO: 24815 - protein, 60 aa, Artificial Sequence
  Synthetic
SEVEDLIRDLERLLKEHDELNKRSMEELEKLLKDLEKMVRDSLREAREIAERVKETIKRT

SEQ ID NO: 24816 - protein, 59 aa, Artificial Sequence
  Synthetic
EKKLDEARKVLEEIKKRLEDSLRRLREEAERIKRELKRILDEHRKEIERIKKEIDEAAR

SEQ ID NO: 24817 - protein, 60 aa, Artificial Sequence
  Synthetic
SEIEKVLRDVEKLVREHEDLNKKSAEEAERLTRDNKRRVDESKKRIREILKEVDEIIRRT

SEQ ID NO: 24818 - protein, 59 aa, Artificial Sequence
  Synthetic
DKDLRRLAEEAERIKKRLRDSLDELRKIIEELEERNRRINEDHRRDLEDVKRRIEEKSK

SEQ ID NO: 24819 - protein, 60 aa, Artificial Sequence
  Synthetic
SEIEEVARRAEKLTKENEELIRRSLRDIERLVKEMEDIVRKSLKEIKELVERLKDISRKT

SEQ ID NO: 24820 - protein, 59 aa, Artificial Sequence
  Synthetic
DEKLRRLAKRIEELKKRNEDLNREHRKRLEEAEKRLKDVLDEHRRRLEEVKKELDEEAK

SEQ ID NO: 24821 - protein, 60 aa, Artificial Sequence
  Synthetic
DEIERVLEEIKKLTDDNRKLVKESIDRAEELLKRHEEENKKSVERARKLVRDLDEIRRKT

SEQ ID NO: 24822 - protein, 59 aa, Artificial Sequence
  Synthetic
KKKLDELARRAEDMERDNKRINKEHRERIKEIKERIKESLDRLAEEIKKIEKELEDKAR

SEQ ID NO: 24823 - protein, 60 aa, Artificial Sequence
  Synthetic
SEIEKVLEDAKKLTKENEDLIRKSLEDNERLLRRHEEENKKSAEDMRDLLRRLEDIIRKT

SEQ ID NO: 24824 - protein, 59 aa, Artificial Sequence
  Synthetic
EELLERLAREIKKLIDKNRKLNEDHRRESEKSERRLRESLRKLAEEAERIEREMDKSRK

SEQ ID NO: 24825 - protein, 60 aa, Artificial Sequence
  Synthetic
SKIEKIVRDAERLLDELRKLAEDVLRRLEELNRRAEDVIRRLAEENTELLKRLEDLLETE

SEQ ID NO: 24826 - protein, 59 aa, Artificial Sequence
  Synthetic
KKKAEELKRKAEEIKRRIDKIVDEVRKAIRDSAEHLKRLLEEYRRRVEEVKKRVRDAAK

SEQ ID NO: 24827 - protein, 60 aa, Artificial Sequence
  Synthetic
DELERLREEVKRLSEENKELIKEMEKRNRELSKENEKVNRELKKRVDDIIRTLKELRKEG

SEQ ID NO: 24828 - protein, 62 aa, Artificial Sequence
  Synthetic
EKEEREIRRVLEDIKRIADENERENREALKRLEETNKRNTDHNRDVLREIDKLFREVAEELR

SEQ ID NO: 24829 - protein, 59 aa, Artificial Sequence
  Synthetic
SEKEEVIKRIREELKENEKENRDVIRKIRELLDELRRRVEEVLRRLKKSNEDIEREAEK

SEQ ID NO: 24830 - protein, 56 aa, Artificial Sequence
  Synthetic
EEELKERIKKLSKENKDRVRRMLERIKKLVDDLRRLLEELRRRNEKLLDRLRKAIK

SEQ ID NO: 24831 - protein, 59 aa, Artificial Sequence
  Synthetic
KDEEKVIEDIRRILEENHRENKEVIDKIRELLRRNEEENKEAIRRMRKSNKEITDRAEE

SEQ ID NO: 24832 - protein, 56 aa, Artificial Sequence
  Synthetic
REELERRVRELSKENKEMLKRVEDKIRELSERNKRTVKKVREDNERLIRRLEEEDK

SEQ ID NO: 24833 - protein, 59 aa, Artificial Sequence
  Synthetic
SELERIEEDVERLNRRNEETLKRIDEALKRLEKSNKELDEKLEETVKRIKDRVERVKRR

SEQ ID NO: 24834 - protein, 62 aa, Artificial Sequence
  Synthetic
DKAKREVDKVRTDAREILKENKRRNEDVIRKIEEKVRDLERRNRDLLRRVKTKIDRLREELK

SEQ ID NO: 24835 - protein, 56 aa, Artificial Sequence
  Synthetic
KELEDIARRVDELNKRNEELIKDAKRVLKEASDKNKEMNERVDDKLRRLAKKVKEL

SEQ ID NO: 24836 - protein, 62 aa, Artificial Sequence
  Synthetic
KEERDKIRDLLRRIREKIEKNRKDAEDVLREIKKLIDENKKRNEEVLKKIEELLRELEKRLE

SEQ ID NO: 24837 - protein, 61 aa, Artificial Sequence
  Synthetic
SRLEKVIKEIKKTHEELERRFKKNSDEAEESLKRLEDELRKVVTDIERKLRDLERRVREAG

SEQ ID NO: 24838 - protein, 59 aa, Artificial Sequence
  Synthetic
EELITRLKKHVDDTAREVEELIKRHTEHNEKLRRDIKKLLEELKRKVDELRKEIETRTR

SEQ ID NO: 24839 - protein, 62 aa, Artificial Sequence
  Synthetic
SELEELIKRAEDTIRRLEREIDELIERHRRSAERLRETLKELIDRHRKSIEDVMRELKRRRG

SEQ ID NO: 24840 - protein, 56 aa, Artificial Sequence
  Synthetic
KEEIERLIKELEKKIKEVVKRIRDIDEDLKRKAKKVVDDLRELNERLERKAKEATK

SEQ ID NO: 24841 - protein, 60 aa, Artificial Sequence
  Synthetic
SEEERLRDHSRRVEELARRAAEKLRRHSEDVKRLITELIKLIEDVMKKIEDEVRDAEKRG

SEQ ID NO: 24842 - protein, 61 aa, Artificial Sequence
  Synthetic
ELKKRIDELHKRNKDKLDEISERLKRLLEENRKLIKEVEERLRKLLEDLRKLIEDVKRRLR

SEQ ID NO: 24843 - protein, 60 aa, Artificial Sequence
  Synthetic
DFEEEIRRNLKRVRDLAKKLEDLIRKHSEEVKRLAEEVKREIEEVIKRAKKKMEDVRRDG

SEQ ID NO: 24844 - protein, 61 aa, Artificial Sequence
  Synthetic
ELKKRADRLLDEHREELKRIEDRLRELLERNNRLLEDIDRRLKELLEDLRRVLKEIEEELR

SEQ ID NO: 24845 - protein, 61 aa, Artificial Sequence
  Synthetic
SEVERLLEDLRRLAKESDESLKKSHRELRKRHEEVRRTIEELLKDLERTVKEIKEELERDV

SEQ ID NO: 24846 - protein, 60 aa, Artificial Sequence
  Synthetic
EEDVRREIKRVLDTIRKLNEDWKRRNEESKRRLDKLLDDAKKAIDKIVEDVKKLLEDARR

SEQ ID NO: 24847 - protein, 61 aa, Artificial Sequence
  Synthetic
SEVEKLLRDLERLARRVREELRKSHEKLDKLARDSKKSIEDLLEDLRRIIEEIEEELDRRV

SEQ ID NO: 24848 - protein, 60 aa, Artificial Sequence
  Synthetic
REDVEREVRRIKREIKELLDRWRRANEEIAREIRKLNEEVKRRVEKILRDLEELLRRLRK

SEQ ID NO: 24849 - protein, 61 aa, Artificial Sequence
  Synthetic
SELEKLEKELKDLLDKIRRDLEKSLKENDELVKKIEEDLKDLLKKLDDRLEKVARDLKREK

SEQ ID NO: 24850 - protein, 60 aa, Artificial Sequence
  Synthetic
RETATKRVKEVLDKLRKMLEDLRRHNEENKRRNKEVLDELRKKAEDVLRRIDEALKELKR

SEQ ID NO: 24851 - protein, 63 aa, Artificial Sequence
  Synthetic
SVEEMETRLKEVADDLKKKIDEVLTRLEKLNRELTKRSRDMNRELERLNKEAEDRARDVLKRV

SEQ ID NO: 24852 - protein, 59 aa, Artificial Sequence
  Synthetic
RDEARKLLRDLERLIEEIKKTLDELLKHHKEELDRIDREHEELLRHHKKTLERIEEKID

SEQ ID NO: 24853 - protein, 60 aa, Artificial Sequence
  Synthetic
DRVEKVLREIEKRLRDHRKRLKDALDEIRKRIEEHEEKSERLNRESKKLLKDLEDMKRRG

SEQ ID NO: 24854 - protein, 56 aa, Artificial Sequence
  Synthetic
EEVVRRARELVKRLEEDHRRMVEEIRRTIKRAEERHKKSVEDNEKLLRDLRDRLEK

SEQ ID NO: 24855 - protein, 60 aa, Artificial Sequence
  Synthetic
SEVEKVLEDLKRLLDEHEKRSRELNKRSKKLADEARRINEELLRELKKLLDELKELKDRG

SEQ ID NO: 24856 - protein, 56 aa, Artificial Sequence
  Synthetic
KKFLDDMRRLLEELKERHERSERENRKLLRKLEEDSKRTNDESKKLLDKLRDDLEK

SEQ ID NO: 24857 - protein, 60 aa, Artificial Sequence
  Synthetic
DRVEEVLKRVEELVKRHDERLKELEDDLRRLIEEHLEKSRRLNKESEKLLKEILEVKRRG

SEQ ID NO: 24858 - protein, 56 aa, Artificial Sequence
  Synthetic
EEVVKTIDEIVKELRKRHEEVRKRLKELLDEMRERHERSVRRNRERLEKLLDDLRK

SEQ ID NO: 24859 - protein, 60 aa, Artificial Sequence
  Synthetic
SEVERVLRDVERLLEEHRKKSKEANDTSRELARRHKEESDRLNKKSEDDARRLEDVKRRG

SEQ ID NO: 24860 - protein, 56 aa, Artificial Sequence
  Synthetic
EDMVRRIREIVKKLKRDHEKSVEDNRRLLRELEERHRESVERNEDLLRRLEERARK

SEQ ID NO: 24861 - protein, 60 aa, Artificial Sequence
  Synthetic
DEVETVLRDLKRLLDEHRRRSEELNKRSEELLREHEERSKRLNERSEKLARELREMKKRG

SEQ ID NO: 24862 - protein, 56 aa, Artificial Sequence
  Synthetic
EEFVKRMDELLRKLEEDHRRSVRENEKLLEELRRRHKKSVDDNRRLLEKLKRDADR

SEQ ID NO: 24863 - protein, 60 aa, Artificial Sequence
  Synthetic
DEVEEVLRRIEELLTRHRKKSDDLNRRSEELAERHERTNRTLLEELRDLAKKLEDLKREG

SEQ ID NO: 24864 - protein, 56 aa, Artificial Sequence
  Synthetic
EEVVKRMRDLVRRAKEEHKKSVDDNRRTLKELHDRSKKTNDDSRELLKRLEDRLRK

SEQ ID NO: 24865 - protein, 60 aa, Artificial Sequence
  Synthetic
REAEEVLERIRRRLEEHLEDNERILREIKKRLDEHREKSKRVNDRSRELVERLLAVKREG

SEQ ID NO: 24866 - protein, 56 aa, Artificial Sequence
  Synthetic
EDIVREIRRIVRELHERSKDSNREVERLVRKLEDDHRESVERNRELLKKLEDDLRR

SEQ ID NO: 24867 - protein, 56 aa, Artificial Sequence
  Synthetic
RLEDVLREVREDLRRLNEESRKVLEENDKLDKDLNRRLKRLEEEARTEIKKVKDRL

SEQ ID NO: 24868 - protein, 60 aa, Artificial Sequence
  Synthetic
EDELEKRLTEVRKELEDRYRELIERSKDIIRRLEEEVRKLEKELRKVLEDLDRRAREATR

SEQ ID NO: 24869 - protein, 59 aa, Artificial Sequence
  Synthetic
SEREDIKRLIEEIRKLVDEAAKEIERNIEEIRRLVKELEELSKKHIDEAREILERLKRR

SEQ ID NO: 24870 - protein, 55 aa, Artificial Sequence
  Synthetic
ELVEEMERDVREVERALRRLLDKHRRVLEDVERRLRRALEENRRVLEEIEEDSRR

SEQ ID NO: 24871 - protein, 58 aa, Artificial Sequence
  Synthetic
KDEEATKKLRKAHEDSERHIKKLSEDTKKVHEESDRHIRKVSKETEDEARRIEKELRK

SEQ ID NO: 24872 - protein, 56 aa, Artificial Sequence
  Synthetic
EDTLEKIIEENKRLNDELAKENKEVIKENRKLNRELEERNKEVIDRMERILEETKR

SEQ ID NO: 24873 - protein, 58 aa, Artificial Sequence
  Synthetic
REEELKREMEKAHEESERHLEELSRKTRDVHRRSEEHLKRLHERTKEVVDRIVEELRR

SEQ ID NO: 24874 - protein, 56 aa, Artificial Sequence
  Synthetic
EETLRRVIEKNRKLNEDIAKRNEEVIETNKKLNEEIARRNEEAIKTARKIVEDTKR

SEQ ID NO: 24875 - protein, 58 aa, Artificial Sequence
  Synthetic
REKEVVDRLREEVRRVEEEVDRLNKELEEIARKVERELDKINEDYKRRLDKVREDIKR

SEQ ID NO: 24876 - protein, 56 aa, Artificial Sequence
  Synthetic
EETVKRILETARELLDRWKKEVDEIVKTLEELLDRWRKEVERVKRENDKLLEELEK

SEQ ID NO: 24877 - protein, 59 aa, Artificial Sequence
  Synthetic
DEKKVLDDLRRIVEKVKRDLDELLKDNRRVLREVEEELKRLNEELRRIAEEVTRELRRL

SEQ ID NO: 24878 - protein, 56 aa, Artificial Sequence
  Synthetic
EKLAEEVARELRRLLREAEETSRDTKRKLREVLREWRELVKKIVDEMRRLLEEIKR

SEQ ID NO: 24879 - protein, 60 aa, Artificial Sequence
  Synthetic
DLERLVEEIKRRLRELLKELHKKSKEIEEEIRRILKRHHELLERIVRRLEELVEEVKRRN

SEQ ID NO: 24880 - protein, 56 aa, Artificial Sequence
  Synthetic
KKLLEDLEREIEKVKKAARDDLRRLEEIVRDVERRLRENVKRLKEEADRVKEELEK

SEQ ID NO: 24881 - protein, 60 aa, Artificial Sequence
  Synthetic
EELERIKDEIRRILEELKREMEELTKESDRILRELERENEESAKRIKEILDELEKRVRDK

SEQ ID NO: 24882 - protein, 59 aa, Artificial Sequence
  Synthetic
ETLLRRLRESLEKLAKEVEDLLRKYERDVRELAKEDRKLNEELLKRVDDLAKEVRERLR

SEQ ID NO: 24883 - protein, 61 aa, Artificial Sequence
  Synthetic
SKLEEIERELRELERSNEEEDRKWDDTTRKLEEDNREKNREWKKLTKDIRERVERLIRDLK

SEQ ID NO: 24884 - protein, 58 aa, Artificial Sequence
  Synthetic
EEARRLDEELEKVLRELKKRNEDTERRDREVNKKLEKENRDSEKENRDVLREIERALR

SEQ ID NO: 24885 - protein, 58 aa, Artificial Sequence
  Synthetic
KKLEDLEEEIKKLLEELKERNERSAREDREILERLRDENRRTAEELDKSVREILKKTG

SEQ ID NO: 24886 - protein, 59 aa, Artificial Sequence
  Synthetic
DRKLKEVRDTLEKLREENRKLNEEWRRKSEELRRRNEKVNKEVRDRNRETIERVDRKAK

SEQ ID NO: 24887 - protein, 61 aa, Artificial Sequence
  Synthetic
EELERADRRLDRLLEESERDLDTIIRKLKKVVEELERTLEEAKRKAERTLEEIRRELKEAG

SEQ ID NO: 24888 - protein, 60 aa, Artificial Sequence
  Synthetic
VEDLLREIKELLDDLRRHNEKLHRELEELIKTLRRHNEKLLEDIERLLRELRKEVEKLRR

SEQ ID NO: 24889 - protein, 60 aa, Artificial Sequence
  Synthetic
DELRELRRELRKLLEDIRRRLEELTRENRDVLRKSREELERLLRRLKELLDRIRDSLRKR

SEQ ID NO: 24890 - protein, 56 aa, Artificial Sequence
  Synthetic
KDKMKKLLRDLERKLKRAEEESKRHIRENEKLTEEAARKVEELLKEIKRKLEELEK

SEQ ID NO: 24891 - protein, 55 aa, Artificial Sequence
  Synthetic
SVEDTIRELEKRIRDLNREMERLNRESVEKIKRLNEKVRREIEDILREIKRLAEN

SEQ ID NO: 24892 - protein, 55 aa, Artificial Sequence
  Synthetic
ESLRRKLKKLADEHRETVDRMHEKNRKLADDHRDSVRKLEERIKRLTDRLREERK

SEQ ID NO: 24893 - protein, 56 aa, Artificial Sequence
  Synthetic
SEVEETLKRLEEVIREAEKTIDDSNREIEEAVRRIKTTIEKSNRDLKDLVEKLKRL

SEQ ID NO: 24894 - protein, 55 aa, Artificial Sequence
  Synthetic
EDVRRRVKEIIDKLERKIEESERNLKRIIEDLEREMRESEERVKEIIRDLERTEK

SEQ ID NO: 24895 - protein, 57 aa, Artificial Sequence
  Synthetic
SEIDEVLKRVEDSVREIERKLEEIERRLRRLNEEVKKRLDEIEEEIRRLVEELRRRN

SEQ ID NO: 24896 - protein, 59 aa, Artificial Sequence
  Synthetic
DDRLREIEKRIDDLNKKVRDEVERLKREADKSLETIKRLVEELKEKLDRLLEEVREEVR

SEQ ID NO: 24897 - protein, 59 aa, Artificial Sequence
  Synthetic
STRERLKKVLRDVERANKELSDRNKRVLEKLRRDVERLSRENEKLVRELEEAIKDLRRK

SEQ ID NO: 24898 - protein, 55 aa, Artificial Sequence
  Synthetic
EDLRREVEEVLKRIRDSNRDNRRKNEKVKKDIREILRRNEKRNREVNEKIRRDET

SEQ ID NO: 24899 - protein, 60 aa, Artificial Sequence
  Synthetic
KETEEVKDVLRRVRKRIEDLSKKNKDDLRRVEERNKELNERVKRLLEELKRRVDDLKRKG

SEQ ID NO: 24900 - protein, 58 aa, Artificial Sequence
  Synthetic
EDLERVEEDVRRVIKEIRDLARENHEENRDVIRRIRESNKRTEDEAREVLDRIRKTAT

SEQ ID NO: 24901 - protein, 56 aa, Artificial Sequence
  Synthetic
KEREEAEEMLKRLEEELRRLLEESEKIIERSERHLEKLLKDAEDEIRRVKEELDKI

SEQ ID NO: 24902 - protein, 59 aa, Artificial Sequence
  Synthetic
REEIRRLIERLRELLEEIARRIEKTNRELEELNKRLADDIKRLIDELERVLREVEERSR

SEQ ID NO: 24903 - protein, 56 aa, Artificial Sequence
  Synthetic
DEVETLLEEARKVLEELRKKIKELNEDSKRVLEELEKRIRDLDRRSTEVLRRLEES

SEQ ID NO: 24904 - protein, 55 aa, Artificial Sequence
  Synthetic
EELEDALRKIRKAVEELKKDVRRTLEEIKKEVKRLIEEARRSLDKIRRDVEKRDE

SEQ ID NO: 24905 - protein, 56 aa, Artificial Sequence
  Synthetic
EEVKRLVDDLREVTKENEKRARDLDRDSKRVSEENARKIETLNRDNERVNKELADS

SEQ ID NO: 24906 - protein, 55 aa, Artificial Sequence
  Synthetic
EKLDEDLERLERRNRKINEDAKTTLREIERENEELNKRLEETLRRSEKHLRDRRK

SEQ ID NO: 24907 - protein, 61 aa, Artificial Sequence
  Synthetic
REVEKLIKELEDLNRDHARKVKELIAELEKLLRDHAEKVRKLIEEARKTLEDLREIVERKG

SEQ ID NO: 24908 - protein, 55 aa, Artificial Sequence
  Synthetic
KDVREMIRRSEENLKRLNEEVKRAIRKVEEDLKELNKRARDVLEELRKRVEDTFR

SEQ ID NO: 24909 - protein, 57 aa, Artificial Sequence
  Synthetic
SEEEELEKRLRDSEREIEKWLRDLERVIEEVAREDKKIHEELEKILEDVKRELDKLG

SEQ ID NO: 24910 - protein, 59 aa, Artificial Sequence
  Synthetic
SKVVEKLVEDLRRINEEAKRRLERLKEELRKVLKDYKDEIDKLVEELKRTLDEVRKKAK

SEQ ID NO: 24911 - protein, 57 aa, Artificial Sequence
  Synthetic
DEEEDVRRTLEKVERDVERIDEDVERELRKVEEDDKRLHKELSEVVEKVERDIRRTG

SEQ ID NO: 24912 - protein, 59 aa, Artificial Sequence
  Synthetic
KKKLEELKERLKEALKRHEDKVRELKKELKKILDDYTEDVKRIKERLKRILEEIRRRKK

SEQ ID NO: 24913 - protein, 57 aa, Artificial Sequence
  Synthetic
SSEEDVKRELERVRREDERIHRDLERVLEESERRVETWDRDAKRTLEKVEEDLRRDG

SEQ ID NO: 24914 - protein, 59 aa, Artificial Sequence
  Synthetic
EELLEELKRRLKEILDRYRREAERLKRENEEMNKRHRERLEELKKRLKELLERMKEARK

SEQ ID NO: 24915 - protein, 57 aa, Artificial Sequence
  Synthetic
STEEDVRRVMKKVEDDVREINRDLERDLRRVEEAVERLDRDAKREIDRLREEIDREG

SEQ ID NO: 24916 - protein, 59 aa, Artificial Sequence
  Synthetic
EKFAEDLKRKLKKVLDEHRRRIEELKRELEEVLERHARELKRLKDELKKLVDDIRRRRK

SEQ ID NO: 24917 - protein, 57 aa, Artificial Sequence
  Synthetic
SDEEDVERELKRVKDEVDKINEDVRRELRKSEEDVERWDEDLERVVRRVEEEVRKTG

SEQ ID NO: 24918 - protein, 59 aa, Artificial Sequence
  Synthetic
KKVLEKLKKDLRDALKRHRDRVEKLKEENRKLNEDHKKTLEDIKEELKRLLDELKETRR

SEQ ID NO: 24919 - protein, 57 aa, Artificial Sequence
  Synthetic
SDEEDVERELERVKRDVERLDEDAKRVLDEVRKAVEEINRDVERDLRRVEEEIKKTG

SEQ ID NO: 24920 - protein, 59 aa, Artificial Sequence
  Synthetic
KEKLKELKERLKRLLDEHRRELKRLKDELKKALDDHKRKVDKLKKELKDILKKIRDDRR

SEQ ID NO: 24921 - protein, 57 aa, Artificial Sequence
  Synthetic
DDEDDVRRVLRRVAEEVRKLDEDLKRVLKESKERVKRWNDDAKRRLDKVREDLKRKG

SEQ ID NO: 24922 - protein, 59 aa, Artificial Sequence
  Synthetic
KKVLEELKKRLEDLLKRHEEEVRRLKEENKKLNDDHRRELERLKKELTDLLKRLDDERK

SEQ ID NO: 24923 - protein, 57 aa, Artificial Sequence
  Synthetic
SLEEDVKRVIDRVREAVKKINDEVEKELRKSEKAVEDWNRRLEEIHDRARRELEKAG

SEQ ID NO: 24924 - protein, 59 aa, Artificial Sequence
  Synthetic
KDKLEELKRRLKRLLDEHRKRVEELKEENKRLNKEHEKKVEDNVRRVRELLKRVEDRRR

SEQ ID NO: 24925 - protein, 60 aa, Artificial Sequence
  Synthetic
SEVEEIVKKLEELLRRWEKTVRDIVEELKRLLEEIEKLSRETKERLKKILEDVKRLAEEG

SEQ ID NO: 24926 - protein, 55 aa, Artificial Sequence
  Synthetic
DELEDIARRVKEELDRLNEELERIARKVKEDLKRLLEDNKRVLDEVKERLDRIRK

SEQ ID NO: 24927 - protein, 59 aa, Artificial Sequence
  Synthetic
SEIEDIVRRLEELLERWKRRVDKAKERNKRLLEKWAKEVEDIKRELEKLLEDVRRLKEE

SEQ ID NO: 24928 - protein, 55 aa, Artificial Sequence
  Synthetic
DELEKIVEDVERELDKINEDYNRVLKRVEEELDRLNEDLNRVAKRVKDALRKIEE

SEQ ID NO: 24929 - protein, 59 aa, Artificial Sequence
  Synthetic
SEIEKVVEEAKKLLKRWEDEVRKHDKELKEVLDRWKKEVDDIKRRLEELLREVRRLKEE

SEQ ID NO: 24930 - protein, 55 aa, Artificial Sequence
  Synthetic
DELRKIVEDVERELDRLNDENRDSLRRVVEALEEINKDLNRDVKRVKDELDKTRK

SEQ ID NO: 24931 - protein, 59 aa, Artificial Sequence
  Synthetic
SEVEEIKKELKKLDEENKRVIDRIVREIERLNEENERVARKVIKEIEELLRKLEKLRRD

SEQ ID NO: 24932 - protein, 55 aa, Artificial Sequence
  Synthetic
EDLRRVLKESEDRNRKLLEDLERKVRDVKRRDDELLKRAREALKRVKDEIEKIRK

SEQ ID NO: 24933 - protein, 59 aa, Artificial Sequence
  Synthetic
SEVEDIIRRIKELDDRNERKVRELVKTNEKLLRDLHEKSKRIVKEMRELLKEIEDLARR

SEQ ID NO: 24934 - protein, 55 aa, Artificial Sequence
  Synthetic
EELKRVIDESKKRNEKLMRDYEEISKKVHEDVERDAERLRRIAKEVEEELERVRK

SEQ ID NO: 24935 - protein, 59 aa, Artificial Sequence
  Synthetic
SEVEKIKEDLKRLLDEVRKKAEELKRENRELLRRLHELSKKIIRELEKLLEELADLVRK

SEQ ID NO: 24936 - protein, 55 aa, Artificial Sequence
  Synthetic
EDLERTIREVEKELRRLLEDYRRESKKVHEDIDEDRRRLEDAVREVEKEIEKVRR

SEQ ID NO: 24937 - protein, 60 aa, Artificial Sequence
  Synthetic
SEVERIKEDIKKSNEDIRRTAEEIKERIKKSNKEVEDEVREIKERIKRILDKLKRVKEEG

SEQ ID NO: 24938 - protein, 59 aa, Artificial Sequence
  Synthetic
KSVVDDLERVMKESEERVKRIIDDLERTLRESEKNLKRIIDDLERVMREAREAIDRLKK

SEQ ID NO: 24939 - protein, 60 aa, Artificial Sequence
  Synthetic
SEDDELRRRLEELKRRIEDLIRKLREVLKRSEDELRKILRELREVDKDLRRRIEELIKDI

SEQ ID NO: 24940 - protein, 56 aa, Artificial Sequence
  Synthetic
EDEAKKRLEEILRRAEELLERLKRTNERVNRKVREDMKRAKEHAKRLLEEAEELAR

SEQ ID NO: 24941 - protein, 57 aa, Artificial Sequence
  Synthetic
DEVEELIKEVEKVNEDAARESEKRNRELKKMLERVKRENKRLIRELKELLDDARRKN

SEQ ID NO: 24942 - protein, 59 aa, Artificial Sequence
  Synthetic
REVLKKLEEVLRESKKRLKEWNDRNKKTLDDIRREIEKSKKEHEDALRRIEEELKKTET

SEQ ID NO: 24943 - protein, 57 aa, Artificial Sequence
  Synthetic
SELEKLVKELRDLNEKVARDSKRLNDKLEEVLDRLRRRNEELIKRLEEVLEDVERKN

SEQ ID NO: 24944 - protein, 59 aa, Artificial Sequence
  Synthetic
KELLDRLRKMLKESRDSLRKLNKENEETLRRIKKKLDESKRKHEEVLKDIKRRLEELSR

SEQ ID NO: 24945 - protein, 57 aa, Artificial Sequence
  Synthetic
DEVERIIERLRRVNKRVREENERLIKEIEDLITEIAKRSRDLNRELDKTLKDVRRKN

SEQ ID NO: 24946 - protein, 59 aa, Artificial Sequence
  Synthetic
EEVLRRLEKVLRESRKSLEDSAKKHKDVLDEVKKTLKKLNDENREVLKRIKKELDKTRT

SEQ ID NO: 24947 - protein, 56 aa, Artificial Sequence
  Synthetic
SEVEKLIEDMKKVAKELADESEEHIKRAEEVIDRLAKEVEKHDRDVEDTIRRLEES

SEQ ID NO: 24948 - protein, 59 aa, Artificial Sequence
  Synthetic
EEVKKRLREMLEELRRRLERLKDKNKEVLDRLEEKLRKLEKENDDSLKEAEDKLRERER

SEQ ID NO: 24949 - protein, 56 aa, Artificial Sequence
  Synthetic
SEVEKLIEDIERIIRTLAEEVRRHDEDARRVLEDLARKVRKHNEDVKKVLEDLRES

SEQ ID NO: 24950 - protein, 59 aa, Artificial Sequence
  Synthetic
EEMKERLRRMLKRAEDELRRLEEENDRVVERLERELRRLTEDNKRTLKKIEEDLRRREK

SEQ ID NO: 24951 - protein, 56 aa, Artificial Sequence
  Synthetic
DEVRDLIRRLEETVKRLADEVREHDKRARDILRELKKEVKETNRRSEKVADDLEKS

SEQ ID NO: 24952 - protein, 59 aa, Artificial Sequence
  Synthetic
EEVKERLKKVLEKLKRDLEKLKEDNRRVLKELEEELRKIKEELDKSLDDLRKRLEDRKK

SEQ ID NO: 24953 - protein, 60 aa, Artificial Sequence
  Synthetic
SLEEKFRRVLEESKESLERLKRKVEKVLRESEERLKRWLDKVKKVLEEVDDALRRLKDRL

SEQ ID NO: 24954 - protein, 59 aa, Artificial Sequence
  Synthetic
KEIVERLIEELKKLNKELADRLEEIIRRLEEINERLRERIERIITRLRRLLEELEREAE

SEQ ID NO: 24955 - protein, 60 aa, Artificial Sequence
  Synthetic
SEDEDLKRVLDEAEKRLKDLLDDLRRALKRSEDELRKNNEDLERVLKRVEERLKELLDRV

SEQ ID NO: 24956 - protein, 59 aa, Artificial Sequence
  Synthetic
REIVEEIKKRIRDLLRELEKKIEELKTTSERLNREHHKKIEDIKKEIEDLVRELEKKVK

SEQ ID NO: 24957 - protein, 60 aa, Artificial Sequence
  Synthetic
SLREKLEEVLRRIEEALERIREEVEKVLRDSRDDNRRVLKELKELLERVREALEDLLRKV

SEQ ID NO: 24958 - protein, 59 aa, Artificial Sequence
  Synthetic
DKIVKEIIEELEKLLRDIKKRARELIEESKRINEDNNRRAEEVAEEIRRLLEELERKLR

SEQ ID NO: 24959 - protein, 60 aa, Artificial Sequence
  Synthetic
SLEEDVKRVLREAEEELKKNNERLRKVIEDSKRDNDRVLDELRKVLEDIEKALRDLLREV

SEQ ID NO: 24960 - protein, 59 aa, Artificial Sequence
  Synthetic
DKIVDEVRKEIEKLVRDHHKRIKDLKDDLKRLNDENNKRAKEIIDEMKRLLEEIEKRVR

SEQ ID NO: 24961 - protein, 61 aa, Artificial Sequence
  Synthetic
KDVEDIKRRIEELNKKLKEKIERIKKRIKELNEEAAKKVEEIKERLKRLLDEIRELVRRDG

SEQ ID NO: 24962 - protein, 59 aa, Artificial Sequence
  Synthetic
DSLRKRLEEVLRESKKTAEDLKRDLRRALEESKKNLKRLLDEVRKVIDEIRKALEELER

SEQ ID NO: 24963 - protein, 61 aa, Artificial Sequence
  Synthetic
SEVEKIKKDIKDLNDDARRRLEEIKRRLEKLLKELEEKHRELKKELKKLLDEVRDLVRREG

SEQ ID NO: 24964 - protein, 59 aa, Artificial Sequence
  Synthetic
DRLREDAERVLRESKKNLDELEKDVRRVIKRIEDEARRLNEDLKRMLERIKRELEKLEK

SEQ ID NO: 24965 - protein, 60 aa, Artificial Sequence
  Synthetic
SEEERLEEVLKRVETELRRLKRELEKVLRESEEALREIIKKIEDAVRDNAEKVKKLSRTV

SEQ ID NO: 24966 - protein, 55 aa, Artificial Sequence
  Synthetic
RRVEKELEDLLRTATKVLEDLKRDLKRLNEETEEVVKTLEDSHRRSNEEVERRVR

SEQ ID NO: 24967 - protein, 60 aa, Artificial Sequence
  Synthetic
REREELEEVLERSKRELERLVEEIKRALDESRRRLEEIEKRIEEVIRRNKEEIKKLSRRV

SEQ ID NO: 24968 - protein, 55 aa, Artificial Sequence
  Synthetic
EKLKEELKELNRESRKVVEDLREKLDRLNKDTERVVRELEKEHRKSNEEVRKTVK

SEQ ID NO: 24969 - protein, 61 aa, Artificial Sequence
  Synthetic
DEEEELKEDIKRILEELRRLAKEHEELNRRINKELEDLVREHKKRLEDALKRLREIVRDRG

SEQ ID NO: 24970 - protein, 55 aa, Artificial Sequence
  Synthetic
EELEKVLKEAEDDVERIKKRLKRINDESRKHVERLKEELDRADKRIEDEVEKLKK

SEQ ID NO: 24971 - protein, 61 aa, Artificial Sequence
  Synthetic
RIEERLKRVVDKVDDTLRKSEKHLEDVVRDADRDIDRNRRENEKVVKEAEDILRRLVEEAG

SEQ ID NO: 24972 - protein, 59 aa, Artificial Sequence
  Synthetic
EDKVRELEEEAERLLDELRRKNEEAVRRIKKLLDDLNKHSEETIRRIKKLLKELEDKTR

SEQ ID NO: 24973 - protein, 57 aa, Artificial Sequence
  Synthetic
STEEKLKELKKEADKLLKELDKELRDNLRRLRKIVEELKKENRDLTRESEEVLKRLN

SEQ ID NO: 24974 - protein, 59 aa, Artificial Sequence
  Synthetic
DKDVKKLIEEIRRILEKAREEVERLSRDSKRVAEELRKRHKELIDRNKRVLEELKRRRD

SEQ ID NO: 24975 - protein, 60 aa, Artificial Sequence
  Synthetic
SEVEEVARRSRKLNDDLKKIIEELIRRSRKINDELRREIERLIRESRKLNRELEELKRRG

SEQ ID NO: 24976 - protein, 56 aa, Artificial Sequence
  Synthetic
EDKVRRLNEENKESLRRLERELEKLNKENEDSLRTLEELLRELNKENKRSLDELRK

SEQ ID NO: 24977 - protein, 56 aa, Artificial Sequence
  Synthetic
SLVEEVEERVKKLHDENRELDRKSKRDVEEVHKKNEKLIKDVERTVREMIRKLREL

SEQ ID NO: 24978 - protein, 56 aa, Artificial Sequence
  Synthetic
EEELRRLEEELRRSIKESREELRRLEDELRRSIEKLEDALRRLAKELDEVIKDLKD

SEQ ID NO: 24979 - protein, 56 aa, Artificial Sequence
  Synthetic
SLVDEVRRRVDELHKDNKRLDDESEKKVRDAHRENERLDDESRRKVKEAIRKLEEL

SEQ ID NO: 24980 - protein, 56 aa, Artificial Sequence
  Synthetic
KESLDRLAEKLKKSIKESEDILRELEKRLRDSIRESRKILEDLRRELEEVIKRLED

SEQ ID NO: 24981 - protein, 56 aa, Artificial Sequence
  Synthetic
SLAEEVEKRVRDLHRKNEELDRESEKKVRDMDRKNKELIKRAEEEVKKVIDKLRKL

SEQ ID NO: 24982 - protein, 56 aa, Artificial Sequence
  Synthetic
EEKLRELARRLKESIRESRERLRRLEKELEDSIRELRRAIDTLTKRLEKAIEELER

SEQ ID NO: 24983 - protein, 56 aa, Artificial Sequence
  Synthetic
SLVEEVERRVRKLHEENKKLDKESEDKVREANRRNEELIKKVTESVRRMIEKLRRL

SEQ ID NO: 24984 - protein, 56 aa, Artificial Sequence
  Synthetic
EEELRRLADELRRSIEESERILKKLEEELRRSIEELRRALEELDEELKRVIRELER

SEQ ID NO: 24985 - protein, 56 aa, Artificial Sequence
  Synthetic
SLVEEVKKRVDDLHKRNRELDDRSEKMVRKANEENKELDKKSKEDVDRLIERAERL

SEQ ID NO: 24986 - protein, 56 aa, Artificial Sequence
  Synthetic
EEELRRLAEKLKRSIEESREILKELERRLRESIRRSREILKRLKEELERAIERLRR

SEQ ID NO: 24987 - protein, 56 aa, Artificial Sequence
  Synthetic
SLAEEVEKLVRDLHRKNKELDRRSKKTVEDIEREARELDKRSKEEVERMIKKLREL

SEQ ID NO: 24988 - protein, 56 aa, Artificial Sequence
  Synthetic
EDKLRELEKELRDSIRESREILERLERRLEELIRRSKRILEELERELEEVIRELRR

SEQ ID NO: 24989 - protein, 56 aa, Artificial Sequence
  Synthetic
SLDDDVEKKVRELDKRNEDLDRKSEKEVEKVHRKNKRLDDESEKEVKRMIEELKKL

SEQ ID NO: 24990 - protein, 56 aa, Artificial Sequence
  Synthetic
EEELRRLAEELRESIERSRERLKELERRLRESIARSREILEELERRLKRAIEDLER

SEQ ID NO: 24991 - protein, 56 aa, Artificial Sequence
  Synthetic
SLAEDVEEKVKELNRRNKKLDDESKEMVKRAHDRNRELDERSKDRVRRVIEKLRRL

SEQ ID NO: 24992 - protein, 56 aa, Artificial Sequence
  Synthetic
KEKLEELAERLRKSIEESRDILRRLEKELRDSIKRSEEILKELTDRLRKVIKDLRD

SEQ ID NO: 24993 - protein, 56 aa, Artificial Sequence
  Synthetic
SLVEEAERRVRELIKELERLDDRSREMVKEMHERNRELIERVEKRVREVIEELRRL

SEQ ID NO: 24994 - protein, 56 aa, Artificial Sequence
  Synthetic
EDDLRKLAEDLKRVLKRSRDILRKLEEDLRRSIRELEEALRKLEEDLRRAIEELET

SEQ ID NO: 24995 - protein, 56 aa, Artificial Sequence
  Synthetic
SLKDDVEKKVEDLKKEAKDLDRESDKKVKTAHKRNEELDRKSADDVRKLIRKLEKL

SEQ ID NO: 24996 - protein, 56 aa, Artificial Sequence
  Synthetic
EEELKRLAEELERLIRDSRRILEELKRELKRSIEESRKILEDLERELEKVIRELKR

SEQ ID NO: 24997 - protein, 56 aa, Artificial Sequence
  Synthetic
SLAEEVERDVKRLDEENKRLDDRSRREVEKMDEENKKLIEDARREVREMIEKLKKL

SEQ ID NO: 24998 - protein, 56 aa, Artificial Sequence
  Synthetic
DEKLKELAKRLRDSLERSKEELKKLEEELRKSIKELEDALKKLEEDLRDVIRKLEE

SEQ ID NO: 24999 - protein, 56 aa, Artificial Sequence
  Synthetic
SLVEDVERKVRELDKRNRDLDRKSKRKVEEADKENRKLDEDSERKVRELERKATEL

SEQ ID NO: 25000 - protein, 56 aa, Artificial Sequence
  Synthetic
EESLRRLEEELRKSIKESKEILDELRKELEKSIRESKERLKELEKRLEELIRELKR

SEQ ID NO: 25001 - protein, 56 aa, Artificial Sequence
  Synthetic
KLVEDAEELVRRLDEENKRLDDDSKRRVEEANRENEKLIKEIEDEVRKMIKKLRDL

SEQ ID NO: 25002 - protein, 56 aa, Artificial Sequence
  Synthetic
EEELRKLAKRLKDSIDRSRKILEELERELRRSIDELRRALEELTDELRKVIEELRK

SEQ ID NO: 25003 - protein, 56 aa, Artificial Sequence
  Synthetic
SLAEEVEKEVKKLDEENRKLDRDSTETVKELNKKNERLDRESKRKVDEVIEKLERL

SEQ ID NO: 25004 - protein, 56 aa, Artificial Sequence
  Synthetic
KEKLDELADELKKSLDRSRRILERLEEELRRSIRRSEDILRRLKEELERVIRELRR

SEQ ID NO: 25005 - protein, 59 aa, Artificial Sequence
  Synthetic
SVDEEVEKLLKEHEERIRELIKEVEKLNREHAKRIEELIRKLKETNKRIADKIRDLKRQ

SEQ ID NO: 25006 - protein, 56 aa, Artificial Sequence
  Synthetic
EEKLRTIARRIKELNDRFKRAIDESRKHIEELNRRLEKVVEDSRRHLEELADEVRR

SEQ ID NO: 25007 - protein, 59 aa, Artificial Sequence
  Synthetic
SVLEELKRLLDEHRERLERLIRELRKLNEDHDRRIKELIERLKKLNEDIAKRIEDLKRD

SEQ ID NO: 25008 - protein, 56 aa, Artificial Sequence
  Synthetic
EDVLRKIEEDIKRLNREVEKAIRESEENIKRTNKRFKDELRKSEKHLEELVKRFRD

SEQ ID NO: 25009 - protein, 59 aa, Artificial Sequence
  Synthetic
SVLEEVTKLLKDHEDRIREIIKRLRKLNRDIDERIKRLIDEVRKKNDDIRRKIEELKRR

SEQ ID NO: 25010 - protein, 56 aa, Artificial Sequence
  Synthetic
EERLKRLREELEKLNRDVERVIKESKENLDRTVTEAKRELKRSEDNLERLAREFER

SEQ ID NO: 25011 - protein, 59 aa, Artificial Sequence
  Synthetic
TEEEILRRVERDLERLNRELERIVREVEKELKKINDDYERVLKKVKDDIDRIREELDRQ

SEQ ID NO: 25012 - protein, 56 aa, Artificial Sequence
  Synthetic
DKELEELLKRWEEDVKRIVEEVKKLLDEWRERVKRAKDENEKLLRDLEKLVEDLAR

SEQ ID NO: 25013 - protein, 59 aa, Artificial Sequence
  Synthetic
SKEDVLREVKRELKRLLDDNRRMLEEVEEAARRLNKDYNDVLKEVEEEIEKIIRELEKK

SEQ ID NO: 25014 - protein, 56 aa, Artificial Sequence
  Synthetic
EEDLKRLLDEVRRLSEKTKEDLERILRKWKEDVERAKERNRRELERLEREIKELAR

SEQ ID NO: 25015 - protein, 57 aa, Artificial Sequence
  Synthetic
ELDKIVEEVRKALREILEDYKRFSKEIHDRDKELADRLREILKDVKRAVDELIKKLS

SEQ ID NO: 25016 - protein, 60 aa, Artificial Sequence
  Synthetic
VEDVVRKLRELLERFRKKAEDLKEENKRINEENERKIREIVKTLRKLLDELREKLERTKK

SEQ ID NO: 25017 - protein, 57 aa, Artificial Sequence
  Synthetic
SLEDTLRKVDKDLKDNMRRLEETAEKVRRDIDRDEERLRRISEELHRRIEELIKRLS

SEQ ID NO: 25018 - protein, 60 aa, Artificial Sequence
  Synthetic
VEDVVRDAKRLLDEHHDLARKIVEDLRRLLEDLHRKSKKSVEDNERLLKRMEEILRETER

SEQ ID NO: 25019 - protein, 56 aa, Artificial Sequence
  Synthetic
SELEEVARRVEKLLEKHKEDLKRLLEKSEEDLRRAEEEVKRLLEEIREELDRLRKR

SEQ ID NO: 25020 - protein, 55 aa, Artificial Sequence
  Synthetic
EEIKKVRKKVEDVHEESKRLNEENRRRTKEVSDKIREIIKEIRKEIKKASDELEK

SEQ ID NO: 25021 - protein, 56 aa, Artificial Sequence
  Synthetic
DELERAVEEVEKRLREHLERIKRLLEESRELLKRHEKLLEDVLRRIRELLKRAEDR

SEQ ID NO: 25022 - protein, 55 aa, Artificial Sequence
  Synthetic
ELIKRVKERVKEAHKRSRELNERNRRETEKMHKKSRDLLRKIREEVDRMSDKLRK

SEQ ID NO: 25023 - protein, 56 aa, Artificial Sequence
  Synthetic
SEEELLRELEKKLRELRRKVDETLRDLRRRLKELEEDHRRTLEESERHLREVEKKL

SEQ ID NO: 25024 - protein, 55 aa, Artificial Sequence
  Synthetic
EKLDRRVEELIKEIEELLREVEKLVEDLIRTIKKLNDDLREDNKRLAKEMEDRAR

SEQ ID NO: 25025 - protein, 61 aa, Artificial Sequence
  Synthetic
SAVEDLEREVRKLIRDLEDLIRRLEERNKRIAEEIEKLNEELNRENKRIADEIRRIKDERG

SEQ ID NO: 25026 - protein, 56 aa, Artificial Sequence
  Synthetic
EEALERLKRELRKLAEELKKVLKRSRDHLKEVKRRHDENIKRSDDHLKRVADEARK

SEQ ID NO: 25027 - protein, 61 aa, Artificial Sequence
  Synthetic
SVAEELEKDIRRIEEEIKELLERHRELNERIVREIEDLNRKLNEMNKRVVEELRKVKRDRG

SEQ ID NO: 25028 - protein, 56 aa, Artificial Sequence
  Synthetic
DRVLKKLEKRLRELEEEAKKLLKESKEHVDEVRKRHEENIRRSEEHLRRVLEELRR

SEQ ID NO: 25029 - protein, 60 aa, Artificial Sequence
  Synthetic
SVVEELERRIEEIAREIEELNERHNRKNKEIADRIRDLNRRLNEANKKIVREIEEIKRRD

SEQ ID NO: 25030 - protein, 56 aa, Artificial Sequence
  Synthetic
SRVLDKLRKELDDLRRRHEENVDRSRKHLEEVRKEHEENIKRSERHLEEVKKEAER

SEQ ID NO: 25031 - protein, 61 aa, Artificial Sequence
  Synthetic
SVVETLEKRVRELIETLERLIERLDRENKRVAEEIKRLLDEHDKTNKEIVERIRDIKRREG

SEQ ID NO: 25032 - protein, 56 aa, Artificial Sequence
  Synthetic
SRVLRKLEEELRKLEEKLRKLLKDSEDHLREVLERAKRVLDDSRRHVDEVRREAEE

SEQ ID NO: 25033 - protein, 61 aa, Artificial Sequence
  Synthetic
SVMEDLERRIREIIKEIEKLLEDLKRENRRVAEEIERLNREHNELNKRIAEEIERIKRRRG

SEQ ID NO: 25034 - protein, 56 aa, Artificial Sequence
  Synthetic
SRVLKKIEDELKKLEDKAREVLKRSRDHLKKVEDDHRENVRRSEEHVKDVLRRFEE

SEQ ID NO: 25035 - protein, 61 aa, Artificial Sequence
  Synthetic
KVLEDLDRDIKRIIDEIRRLNEELNREIEEIKRRIKRLNEEHNERNKRLAEEARRIKDERG

SEQ ID NO: 25036 - protein, 56 aa, Artificial Sequence
  Synthetic
DEVLKRLEEKLERLREEHERNAREIRKELEKLEKEHRENVERSRRHVERVEREFET

SEQ ID NO: 25037 - protein, 61 aa, Artificial Sequence
  Synthetic
SVVERLKEIAEEIIRRIEELNKEHNKRNREIAETIERLNREHNELNKTLVREMKEIKRDKG

SEQ ID NO: 25038 - protein, 56 aa, Artificial Sequence
  Synthetic
SEVLKKIEEDLRRLLRKHEENSKESEKHVEEVEERHRRNAEDSKRHVEKVKEEVDR

SEQ ID NO: 25039 - protein, 59 aa, Artificial Sequence
  Synthetic
STEEVLKEIRDRLEELKREAKKVNDDTRERLKELEERNRRANEESKRRLEELERRVEER

SEQ ID NO: 25040 - protein, 59 aa, Artificial Sequence
  Synthetic
ERLLRELRRKLKEVEDTIRELNERLRKRIREIEEEVRESNERLRKKLREILEEIKETEK

SEQ ID NO: 25041 - protein, 59 aa, Artificial Sequence
  Synthetic
SVVEEIDKIIKRIADRVRKIIEDLERLNKEIADLLRRIIEELKRLNDRIREEVDRLRRR

SEQ ID NO: 25042 - protein, 56 aa, Artificial Sequence
  Synthetic
EKVLEDVERKLERLKREVRRVLEESRKRLKEWKDRAREVLEESKRSLEEISRRLRE

SEQ ID NO: 25043 - protein, 59 aa, Artificial Sequence
  Synthetic
SADETLRKVVEEVARKSEKLNKELEKVNKDLARAVEELIEELKDVITKIEERAKRLKDR

SEQ ID NO: 25044 - protein, 56 aa, Artificial Sequence
  Synthetic
ERVLEEIRERIERLNKRNKEVLDRSEESLRRLAEKLRRVIERVEEKLRKIEEDLKT

SEQ ID NO: 25045 - protein, 61 aa, Artificial Sequence
  Synthetic
DKEDAIRTAEKRIRDSERENEKVDEDYRRELKRSEDKNEKADKEYKRRIEELVRRLLETRG

SEQ ID NO: 25046 - protein, 56 aa, Artificial Sequence
  Synthetic
EDTLRKLVDDIEERNRRIIEELKRHLDKLREDNERVIEELKRHLEEVAREVERRRK

SEQ ID NO: 25047 - protein, 56 aa, Artificial Sequence
  Synthetic
SEKEEAEKLLREHHEKIKRLKEESKRINDENRKRIEELKRRSREINKELEEKVRRN

SEQ ID NO: 25048 - protein, 56 aa, Artificial Sequence
  Synthetic
EDTVKRIEDELKKNLDDLRRVLEKSKDDNRKLLEDLERELRESKKDARRLLEEVRK

SEQ ID NO: 25049 - protein, 56 aa, Artificial Sequence
  Synthetic
SKEEELEKLLREHHEKIKRLKEESKRINDRIRRTVEELIKESEKINRDINDTVRKN

SEQ ID NO: 25050 - protein, 56 aa, Artificial Sequence
  Synthetic
EDSVERIKRELERNLDDLRRVLKESEDDLREILRRLKEVLEESERDLERVEREVRK

SEQ ID NO: 25051 - protein, 59 aa, Artificial Sequence
  Synthetic
SELEELLERLERLIEENRRELEELIRELKEESDRTREELKRLIDRLKEKIDRVLKLKED

SEQ ID NO: 25052 - protein, 56 aa, Artificial Sequence
  Synthetic
KDVLKEARERLRKLHEETKEAKKDLDRILDENEKEVKEVKKRLEDLLKELRDRLRK

SEQ ID NO: 25053 - protein, 57 aa, Artificial Sequence
  Synthetic
SELEEVLKRIREEAERLMRRNEETLRRVKKTIEDLLRRNEKRLEDVKREADEIEKRK

SEQ ID NO: 25054 - protein, 55 aa, Artificial Sequence
  Synthetic
ERVKEEIERIEKRVREVHEEVNKRIEDLRREYRKEHKRVEDEIRRILREVREKRR

SEQ ID NO: 25055 - protein, 56 aa, Artificial Sequence
  Synthetic
SEKEEVKKESEKLSRDTKKRSDEVHKEIKRLTDETERELREVEKEIERLAEELRRQ

SEQ ID NO: 25056 - protein, 59 aa, Artificial Sequence
  Synthetic
EKVLEDELRENKKENKDLKERHDRTLEEVERTNRKVKEELRRVLRRVEESVREVAERAT

SEQ ID NO: 25057 - protein, 61 aa, Artificial Sequence
  Synthetic
SKEETIEKRVEELKRENDEKVERIKREIEDLIRRNKELLERIKKEVRELLKELKDRAEKKG

SEQ ID NO: 25058 - protein, 60 aa, Artificial Sequence
  Synthetic
DRELDKALEDIERRIREHNKELDDELRKVREDSRRHLEKLKRELEEIREEARRITEELKK

SEQ ID NO: 25059 - protein, 60 aa, Artificial Sequence
  Synthetic
EEKELLDKLKEDADRIKKELEDTLRELKKKHDDVNDRNRKHHEEVRRRAEKIKDKLRRDK

SEQ ID NO: 25060 - protein, 55 aa, Artificial Sequence
  Synthetic
EEVRKRLDDLEREIKKIIDEIDERHRRLTEENKRSLDRDREELEKLKEEIKRTAD

SEQ ID NO: 25061 - protein, 58 aa, Artificial Sequence
  Synthetic
DEAEKIKEDAKRLIEENDEIVRRIEEEMKKSHKENREILKKIKEDVDRSHEDLRRRSG

SEQ ID NO: 25062 - protein, 56 aa, Artificial Sequence
  Synthetic
EEVLKDLRRRSEEHKKKLEDDLRRHEKKSRDHKEKLKELLERHKRRVEEVRKRETK

SEQ ID NO: 25063 - protein, 60 aa, Artificial Sequence
  Synthetic
SREELMEELERLLERLIREIEKASRENEERVKELKREIEESTKRNKETAKKLLDELTRSN

SEQ ID NO: 25064 - protein, 55 aa, Artificial Sequence
  Synthetic
DELRKTLEDIRRRVEEAKERHRRILKTIKERSEKLTREHRKVNEDIEEKLRRAKK

SEQ ID NO: 25065 - protein, 61 aa, Artificial Sequence
  Synthetic
SERETVERVLDRLREELEKIKKELEDVNRESKKEVERLLRRNEELHKKVEKDARDILRKKG

SEQ ID NO: 25066 - protein, 55 aa, Artificial Sequence
  Synthetic
EELKKTLDKILEDAKEEVREDRKRNEKLNRELEERSRRNEEDLRRLLKKLKDEAD

SEQ ID NO: 25067 - protein, 60 aa, Artificial Sequence
  Synthetic
DEKETIEERRKEIEKIIKDLEKNVRDHEKRIEEIIKEIRDNTEKLKKEAEDLLRRIRKEG

SEQ ID NO: 25068 - protein, 55 aa, Artificial Sequence
  Synthetic
RELEETLRRLDERTKKVIKEAEDVHRRLRERLRKIEKEHEDTLRELKKRLDDEAR

SEQ ID NO: 25069 - protein, 61 aa, Artificial Sequence
  Synthetic
SAEDRLREADERYERELRRLKRELEEVIKEYRKAIEELKKELEDVLRRFREELKRLEEEKG

SEQ ID NO: 25070 - protein, 58 aa, Artificial Sequence
  Synthetic
EEVREIIERLKESLKRNEEDVRRLIRRLKEELKRNKEEVERLKKELEDILRELADRAR

SEQ ID NO: 25071 - protein, 61 aa, Artificial Sequence
  Synthetic
DAERELKKVEDEYEKRIRDLERDLRRVLEEYERAIEELKKELDDVLREAEKALEDLLRKKG

SEQ ID NO: 25072 - protein, 59 aa, Artificial Sequence
  Synthetic
GEEVKEIKKELEESLKRNEDKVRELKRRLEELLKENEKKVRELIRRLEEELRRLAERTR

SEQ ID NO: 25073 - protein, 61 aa, Artificial Sequence
  Synthetic
SAEEELKKVDDDYEREIRRLEKELEDVLRDVDRDHRRLEEELKKVIRDIEEALKDLLRKKG

SEQ ID NO: 25074 - protein, 58 aa, Artificial Sequence
  Synthetic
EEVREIKERLRKSLEDNERKVKEIIDRIREDLKENRDRVRKLIKDLDDELKELAKKAK

SEQ ID NO: 25075 - protein, 60 aa, Artificial Sequence
  Synthetic
DEEREIEERIKRILEDLKRNLEDNERKIRKIVKDNRENNKRNEDKIRRILEELKRAKEEG

SEQ ID NO: 25076 - protein, 55 aa, Artificial Sequence
  Synthetic
ERVRKLEKDLEKALEEIRRRYEELLKRLKRENEESKKTYDKLIEELRRAAREIKR

SEQ ID NO: 25077 - protein, 60 aa, Artificial Sequence
  Synthetic
DEKERIEEEIRRILRELEELTERNEKKIRDIVREIRKNSEENRRKIEKILEELEELKKEG

SEQ ID NO: 25078 - protein, 55 aa, Artificial Sequence
  Synthetic
EEVEELLRRLRKRLEDLERRNKELLEELKERLERAEKRNRDLLKELEDALERIRK

SEQ ID NO: 25079 - protein, 60 aa, Artificial Sequence
  Synthetic
DEEEEIEKKLRKNIRDAEEKTKRNKERAEDNLRKARENSKRNEEDIRRKLKRLKELKEEG

SEQ ID NO: 25080 - protein, 55 aa, Artificial Sequence
  Synthetic
ERVDRLKKELERMHRKLDKENRDIEKRVREEHRRLTERNRKLLEDLEEALERIRT

SEQ ID NO: 25081 - protein, 60 aa, Artificial Sequence
  Synthetic
SEEEEIERRLRDNIRKAEENTRRNKEKIDRILEEMRENSKENKRRIEEILDELRKLKEEG

SEQ ID NO: 25082 - protein, 55 aa, Artificial Sequence
  Synthetic
ERVDELKEKVERDHERLRKENEDLLRELRKRLDELRRENEKLLRELEEALDRIRK

SEQ ID NO: 25083 - protein, 60 aa, Artificial Sequence
  Synthetic
SELERVREEIRRLERENEETLREVEEKIRKLLEENREALERVEERVRRVKEELKEVRRRQ

SEQ ID NO: 25084 - protein, 59 aa, Artificial Sequence
  Synthetic
DDVRRDIERLDEEYERRHKDVNRKLKRLDDEYEKATRDVRRRLEELTKELRDEAEKVRK

SEQ ID NO: 25085 - protein, 56 aa, Artificial Sequence
  Synthetic
SERERVDRLEERYEEESRRVEEELRRLLKRYEDFHRELRKRLEDIVREVRKTLKEL

SEQ ID NO: 25086 - protein, 56 aa, Artificial Sequence
  Synthetic
TREIEKRVERLLEENEERLRRVRKEIKKALDENREILKEVEDRARKILEELRRKAK

SEQ ID NO: 25087 - protein, 59 aa, Artificial Sequence
  Synthetic
SELEEVKRRVEEIKKKLKEDLDDHKRRNEKHIKELEDRLEEHRREIEELVRKLEELKRR

SEQ ID NO: 25088 - protein, 59 aa, Artificial Sequence
  Synthetic
EEVRKALKELEDDLRRVLEEIKRAHKKSKEDNKRVLDDLTEKHKRSEEELRDVLRDLER

SEQ ID NO: 25089 - protein, 60 aa, Artificial Sequence
  Synthetic
SSLEELEKRNRERIEELERTLRELEERSRELNERLKRELDEHKKRIDELLEELRRLKEEN

SEQ ID NO: 25090 - protein, 59 aa, Artificial Sequence
  Synthetic
EEVRRALEELEKSHDEVRERIKRRLDESKERNKRALEKIKRDHEESEERLRRALDRTRK

SEQ ID NO: 25091 - protein, 60 aa, Artificial Sequence
  Synthetic
SSLEEVKKENEKLIKELKEELDKIRKENEEHIEKLERELERVKREAEKIKKKLEELKREN

SEQ ID NO: 25092 - protein, 59 aa, Artificial Sequence
  Synthetic
KEVKDALEELKRSHRKVAKEIKEAVKESRKKNEEVAKKIKKALDELKRELDEALKEAKR

SEQ ID NO: 25093 - protein, 60 aa, Artificial Sequence
  Synthetic
DEVETLEERVRRLKKELRDELKRNEDKVRKLKRELEESLKENAKKVEEVERDLERVKREG

SEQ ID NO: 25094 - protein, 59 aa, Artificial Sequence
  Synthetic
DEVRREIERLKRELERVIREYREAIERLKRDLKRAIDKYREDIKRLEEKLRRVDKELEK

SEQ ID NO: 25095 - protein, 59 aa, Artificial Sequence
  Synthetic
SEVERVREENKRSEEKLKKLLEDSRRNLEENRKRLEELLRKSEENLERLKRELDELRKQ

SEQ ID NO: 25096 - protein, 55 aa, Artificial Sequence
  Synthetic
EDLRRNRETNEELRDRVRRTHEKLEREAEKVHEDVRRRHKELEDEVREVLKELRR

SEQ ID NO: 25097 - protein, 56 aa, Artificial Sequence
  Synthetic
SDEELIKRIREELERLLKELRDTIKEVEDRNRESLEDLDRVHKRIKEEIERLEKDL

SEQ ID NO: 25098 - protein, 60 aa, Artificial Sequence
  Synthetic
SEELAKKLKDELRRAKDKVEEIKKRIRDTLEDNRKKAEELKRKNEEDLRRFEKKAEDVRK

SEQ ID NO: 25099 - protein, 56 aa, Artificial Sequence
  Synthetic
SKEDKAREDVKRTIEELKDRNRKLNDKIRKTIEDLERRNEELNKENKDLVDELRDG

SEQ ID NO: 25100 - protein, 56 aa, Artificial Sequence
  Synthetic
EEVLRELREEIEKLEKEHRDNVRKLERDLDRLRKKHEDNKERLERHTRRVEEEKRR

SEQ ID NO: 25101 - protein, 60 aa, Artificial Sequence
  Synthetic
STEEDVRKIVDDARRNLEENKRRIEKIVKELEDKLRENEKKIRKILEDIRRLLEKFKRDD

SEQ ID NO: 25102 - protein, 56 aa, Artificial Sequence
  Synthetic
EDIMRDLRRRLERIAREYKRLLDELKKRLDDIKKTYEDLLRRLREEIERAEEKARR

SEQ ID NO: 25103 - protein, 60 aa, Artificial Sequence
  Synthetic
DEEEEVRKILEEIKKELDDNERRIRKNIRDAEETLRENEKRIRDILKEIEDLLKELKDRD

SEQ ID NO: 25104 - protein, 56 aa, Artificial Sequence
  Synthetic
EDILEKLRRDIERADEEYKRLEEELRRKHDEIRKTYEKLLKELEEAIERVEREAEK

SEQ ID NO: 25105 - protein, 55 aa, Artificial Sequence
  Synthetic
SSKDLLEELRRTVEEVRKRSDDLSRESEEATRRVRKEHDRINKEVEDELRRVRED

SEQ ID NO: 25106 - protein, 56 aa, Artificial Sequence
  Synthetic
EDIVREMRKRLEELLRENEKRNEELLRRLKELLDRSRERVREIEERLRELLEEVRR

SEQ ID NO: 25107 - protein, 57 aa, Artificial Sequence
  Synthetic
DAEKLKRDYEEKSRRVKETLDDLVRRYREEHRRVNEELRKLLEDLKKTVEDVEKEEG

SEQ ID NO: 25108 - protein, 60 aa, Artificial Sequence
  Synthetic
SERLEREIRKLEEENKRTLERVKEKIERLLEENEKVLKEVRDKVKTIKDRLRKLVEEIRR

SEQ ID NO: 25109 - protein, 60 aa, Artificial Sequence
  Synthetic
SVEDEVRKIKRRLEEALERSEKKVRDMVRRNKEFLERAKRRVEEVVKENERALEEVKRRG

SEQ ID NO: 25110 - protein, 56 aa, Artificial Sequence
  Synthetic
EEILRRVRKTVKDVEDTLKELNDRLEKIHREVKKELDRLLKELDDRHRKVAEDLKK

SEQ ID NO: 25111 - protein, 59 aa, Artificial Sequence
  Synthetic
SVEELLRKLEEVLRKIREENERSLKELRDRAREIVKRNRETNRELEEVIKELEKRLSGA

SEQ ID NO: 25112 - protein, 59 aa, Artificial Sequence; identical to SEQ ID NO: 14436
  Synthetic

SEQ ID NO: 25113 - protein, 57 aa, Artificial Sequence
  Synthetic
DEVEKVLEEIKRALDDLRKKVEESKREIKEALKAVEKHTRDSDTANKRTLAEIERGV

SEQ ID NO: 25114 - protein, 55 aa, Artificial Sequence
  Synthetic
ERVVEEVRRVLEELRRRLEKVTEDSRRAIERLAREDARVSKKSIDVNKKLDDDVR

SEQ ID NO: 25115 - protein, 60 aa, Artificial Sequence
  Synthetic
DAEELVRELEERIKRSHERLEELLREVKRLIERSHEELKRLNEEVLRELDRVLDEVAKRG

SEQ ID NO: 25116 - protein, 55 aa, Artificial Sequence
  Synthetic
KDSARELERIVKENAELAERVFREVEKIVRENTKLAEDSVRELKRLVEELKKRAK

SEQ ID NO: 25117 - protein, 58 aa, Artificial Sequence
  Synthetic
SAADEVVERMKELVATVKRENDEVVKELKKLVKELEDDNRRVVEESKKSVEDLARRVG

SEQ ID NO: 25118 - protein, 56 aa, Artificial Sequence
  Synthetic
EDLVREVEKRVRDIVEESRKLAEETRKAVEDIIEKSKRIAEDTLEKNKEMVERLER

SEQ ID NO: 25119 - protein, 55 aa, Artificial Sequence
  Synthetic
SESDEVIRDLARLLDELARHVDDSVRRMDEVVKRSTREADELAKRLDELVKEVEK

SEQ ID NO: 25120 - protein, 56 aa, Artificial Sequence; identical to SEQ ID NO: 15500
  Synthetic

SEQ ID NO: 25121 - protein, 55 aa, Artificial Sequence; identical to SEQ ID NO: 25119
  Synthetic

SEQ ID NO: 25122 - protein, 56 aa, Artificial Sequence; identical to SEQ ID NO: 15500
  Synthetic

SEQ ID NO: 25123 - protein, 55 aa, Artificial Sequence
  Synthetic
SESDDVIRKLRELLEELRTHVEKSIRDLRKILEDSTRHAKRSIEELERLLEEVRK

SEQ ID NO: 25124 - protein, 56 aa, Artificial Sequence; identical to SEQ ID NO: 15502
  Synthetic

SEQ ID NO: 25125 - protein, 55 aa, Artificial Sequence; identical to SEQ ID NO: 25123
  Synthetic

SEQ ID NO: 25126 - protein, 56 aa, Artificial Sequence; identical to SEQ ID NO: 15502
  Synthetic

SEQ ID NO: 25127 - protein, 60 aa, Artificial Sequence
  Synthetic
DREREVKKRLDEVRERIERLLRRVEEESRRVAEEIRRLIEEVRRRNKKVTEEIRELLKGL

SEQ ID NO: 25128 - protein, 55 aa, Artificial Sequence
  Synthetic
EELREELKKLERKIEKVAKEIHDHDKEVTERLEDLLRRITEHARKSDREIEETAR

SEQ ID NO: 25129 - protein, 60 aa, Artificial Sequence; identical to SEQ ID NO: 25127
  Synthetic

SEQ ID NO: 25130 - protein, 55 aa, Artificial Sequence; identical to SEQ ID NO: 25128
  Synthetic

SEQ ID NO: 25131 - protein, 57 aa, Artificial Sequence
  Synthetic
SEVDEAVKNNEEDAKESRRVVEEAVKRDEDIARDIERAAREVVERDKEIVDEVRRGV

SEQ ID NO: 25132 - protein, 60 aa, Artificial Sequence
  Synthetic
SKETKDLLDENSKRSNEISREVKKDLERTVRENKKIVDEVAKALEDTVDKNRRIVEEVTT

SEQ ID NO: 25133 - protein, 60 aa, Artificial Sequence
  Synthetic
SEAEELLKRLEDRAEEILRRLEEILRTSRKLAEDVLRELEKLLRESERRIREVLEELRGI

SEQ ID NO: 25134 - protein, 59 aa, Artificial Sequence
  Synthetic
KEVVDEIKRIVDEVRERLKRIVDENAKIVEDARRALEKIVKENEEILRRLKKELRELRK

SEQ ID NO: 25135 - protein, 57 aa, Artificial Sequence
  Synthetic
SRAETVLKEVTDKIKKLADSSDELLRRNKENIDELKKSSEELLRRLTKAIEEIEKGS

SEQ ID NO: 25136 - protein, 56 aa, Artificial Sequence; identical to SEQ ID NO: 16914
  Synthetic

SEQ ID NO: 25137 - protein, 57 aa, Artificial Sequence; identical to SEQ ID NO: 25135
  Synthetic

SEQ ID NO: 25138 - protein, 56 aa, Artificial Sequence; identical to SEQ ID NO: 16914
  Synthetic

SEQ ID NO: 25139 - protein, 57 aa, Artificial Sequence
  Synthetic
DEVRELLERNRRLLEEIKKTVKDLIRANEELLKRIEDDAKRLIDRNEELLDELEKGL

SEQ ID NO: 25140 - protein, 59 aa, Artificial Sequence
  Synthetic
SEELEELRRVVEESDETIKRLLEEAKESVDRSLDRIRKLLEDVRRSVERSAKRIDEKRK

SEQ ID NO: 25141 - protein, 60 aa, Artificial Sequence
  Synthetic
STEEVLDEIRKLHKTLTEDIKRVLREIEELHRRTIEENKEVLDKIAEDYKRVIDDVRTKD

SEQ ID NO: 25142 - protein, 56 aa, Artificial Sequence; identical to SEQ ID NO: 18130
  Synthetic

SEQ ID NO: 25143 - protein, 60 aa, Artificial Sequence; identical to SEQ ID NO: 19323
  Synthetic

SEQ ID NO: 25144 - protein, 62 aa, Artificial Sequence
  Synthetic
EDSERLVREVEDLVRRLVRRSEKSNEEVKRTVEELVRRMEESNDRVRDLVRRLVEELKRAVD

SEQ ID NO: 25145 - protein, 59 aa, Artificial Sequence
  Synthetic
SEAEKAKETIDRLADRVRKLLEEIKRSLDDSRRKSKETVEENEKTLDRMRKEVDAAKRG

SEQ ID NO: 25146 - protein, 56 aa, Artificial Sequence; identical to SEQ ID NO: 19650
  Synthetic

SEQ ID NO: 25147 - protein, 59 aa, Artificial Sequence; identical to SEQ ID NO: 25145
  Synthetic

SEQ ID NO: 25148 - protein, 56 aa, Artificial Sequence; identical to SEQ ID NO: 19650
  Synthetic

SEQ ID NO: 25149 - protein, 56 aa, Artificial Sequence
  Synthetic
SEVEELIKRLAKVLKELVDKVRKVIEDTKELLERLKRRSEDHIRKLREVLKEAKDQ

SEQ ID NO: 25150 - protein, 59 aa, Artificial Sequence
  Synthetic
EELDRRIEKVLKEIEEKIREVIKEWERVHREVEELLKRLIDENRKVLDEIRKLLEEKSK

SEQ ID NO: 25151 - protein, 56 aa, Artificial Sequence; identical to SEQ ID NO: 25149
  Synthetic

SEQ ID NO: 25152 - protein, 59 aa, Artificial Sequence; identical to SEQ ID NO: 25150
  Synthetic

SEQ ID NO: 25153 - protein, 59 aa, Artificial Sequence; identical to SEQ ID NO: 19801
  Synthetic

SEQ ID NO: 25154 - protein, 59 aa, Artificial Sequence
  Synthetic
DKALEEAKRVLAENNEVIKDIKRALDELLKELEKSVRESEERLRRLLEEVKRVIEEVAT

SEQ ID NO: 25155 - protein, 59 aa, Artificial Sequence
  Synthetic
SEAERLEARARELLRANEELMDDLRAKAEELLKRNDRLVKEIEKKVREVLAAIEELKRR

SEQ ID NO: 25156 - protein, 59 aa, Artificial Sequence
  Synthetic
KRLEELLRRLNEEHKRISDELRKLLDEALEAHRELSRRLEEELERLLREIERLVEEVTR

SEQ ID NO: 25157 - protein, 56 aa, Artificial Sequence
  Synthetic
SVDEVLKEIEDALRRLKEEVERVLKENEDELRRLEEEVRRVLKEDEELLESLKRGV

SEQ ID NO: 25158 - protein, 59 aa, Artificial Sequence
  Synthetic
EKAIRDVAKEIRDRLKELEEEIEEVTRRNLKLLADVEEEIRRVHEKTRRLLETVLRRAT

SEQ ID NO: 25159 - protein, 60 aa, Artificial Sequence
  Synthetic
DDLERAREEVADLIRKHEEKTRRILEESRRLNERHRELSARILDEIRKLAERIEELIKRE

SEQ ID NO: 25160 - protein, 59 aa, Artificial Sequence; identical to SEQ ID NO: 20434
  Synthetic

SEQ ID NO: 25161 - protein, 57 aa, Artificial Sequence
  Synthetic
KEVEDAVKELEDLLRANEDKTRSIVEDMRASNKDLEDHSRASEEEVRKLLDDLRRAG

SEQ ID NO: 25162 - protein, 56 aa, Artificial Sequence
  Synthetic
IKTLLDRVRKLAEEDAERLDRLRRESEELNERVRRVDKKLLEEIRRKAKKVEDDTR

SEQ ID NO: 25163 - protein, 57 aa, Artificial Sequence; identical to SEQ ID NO: 25161
  Synthetic

SEQ ID NO: 25164 - protein, 56 aa, Artificial Sequence; identical to SEQ ID NO: 25162
  Synthetic

SEQ ID NO: 25165 - protein, 56 aa, Artificial Sequence
  Synthetic
DEEEDLERAIKKLLDENRELLKRIAEELRRLLEELRRLTEESADRLRRLLKELKDR

SEQ ID NO: 25166 - protein, 56 aa, Artificial Sequence
  Synthetic
AETLLRELEKLSRDNKELLKKIEKEIRDLIKEDKERNIELSERLRKLVEELKKKAT

SEQ ID NO: 25167 - protein, 56 aa, Artificial Sequence; identical to SEQ ID NO: 25165
  Synthetic

SEQ ID NO: 25168 - protein, 56 aa, Artificial Sequence; identical to SEQ ID NO: 25166
  Synthetic

SEQ ID NO: 25169 - protein, 57 aa, Artificial Sequence
  Synthetic
DDAERILREMERLLEENKEISDEIAKELKRLLDENRKLSEDVVKALEDLLRDLERRS

SEQ ID NO: 25170 - protein, 59 aa, Artificial Sequence
  Synthetic
KDTLRELARSIRKLSAENKERLKELLRELKKLSDENKERIKKLLSDAEKIIEDVARRAK

SEQ ID NO: 25171 - protein, 60 aa, Artificial Sequence
  Synthetic
SSEERLRAVIEDLKRLAEESRKRHKELIDELAKAVERIERRHKKLLDEIKAVVDDIRRGV

SEQ ID NO: 25172 - protein, 56 aa, Artificial Sequence
  Synthetic
ADTIIEEVKRVLEELARSTEEVEKRVRDAIEELERSSEELARRIKEVLKRLEEETR

SEQ ID NO: 25173 - protein, 60 aa, Artificial Sequence
  Synthetic
DEARELVKELEDLIREITKTVRRLLEESEELIKRIDDAVDDLRRADEDLNREIKEEIEKG

SEQ ID NO: 25174 - protein, 56 aa, Artificial Sequence
  Synthetic
ERILRELEERVKELEKEAREILKRSEDETDKLREKAERILEDLERANRRTMDEARR

SEQ ID NO: 25175 - protein, 60 aa, Artificial Sequence; identical to SEQ ID NO: 25173
  Synthetic

SEQ ID NO: 25176 - protein, 56 aa, Artificial Sequence; identical to SEQ ID NO: 25174
  Synthetic

SEQ ID NO: 25177 - protein, 59 aa, Artificial Sequence
  Synthetic
DEIRKVVKEITDLLKASNDKNRKVVEEIRDLLRKSKKLADELVERLRALVEDLRRRIDK

SEQ ID NO: 25178 - protein, 59 aa, Artificial Sequence
  Synthetic
SEDLKRVEERAREVSRRNEESMRRVKEDADRVSEANKEVLDRVREEVKRLIEEVRETLR

SEQ ID NO: 25179 - protein, 59 aa, Artificial Sequence; identical to SEQ ID NO: 25177
  Synthetic

SEQ ID NO: 25180 - protein, 59 aa, Artificial Sequence; identical to SEQ ID NO: 25178
  Synthetic

SEQ ID NO: 25181 - protein, 57 aa, Artificial Sequence
  Synthetic
STAETVEKKVEEVIRENEKSMRESEEKVDRSTKRIEDVLRRLEETIRKTSDDIAKGV

SEQ ID NO: 25182 - protein, 59 aa, Artificial Sequence
  Synthetic
REDATRVIEEAKRILDEARKLNEETIRRSEELVRRIERVIEEIIKRSEKLLEDVARESK

SEQ ID NO: 25183 - protein, 57 aa, Artificial Sequence; identical to SEQ ID NO: 25181
  Synthetic

SEQ ID NO: 25184 - protein, 59 aa, Artificial Sequence; identical to SEQ ID NO: 25182
  Synthetic

SEQ ID NO: 25185 - protein, 57 aa, Artificial Sequence
  Synthetic
STAETVAEEVERVLKHSDDLIKEVEDVNRRVEEEIKRVIRELEEENERLVAEVRKGV

SEQ ID NO: 25186 - protein, 59 aa, Artificial Sequence
  Synthetic
EEAAREIIKRLREVNKRTKEKLDELIKHSEEVLERVKRLIDELRKHSEEVLEDLRRRAK

SEQ ID NO: 25187 - protein, 57 aa, Artificial Sequence; identical to SEQ ID NO: 25185
  Synthetic

SEQ ID NO: 25188 - protein, 59 aa, Artificial Sequence; identical to SEQ ID NO: 25186
  Synthetic

SEQ ID NO: 25189 - protein, 59 aa, Artificial Sequence; identical to SEQ ID NO: 21345
  Synthetic

SEQ ID NO: 25190 - protein, 56 aa, Artificial Sequence
  Synthetic
AETIERVVRELLEENKEVLRKTEEAVKRSTETNKRLLEASKEVADRLRERIKEAAK

SEQ ID NO: 25191 - protein, 61 aa, Artificial Sequence
  Synthetic
SRVEEIIEDLRRLLEEIRKENEDSIRRSKELLDRVKEINDTIIAELERLLKDIEKEVREKG

SEQ ID NO: 25192 - protein, 59 aa, Artificial Sequence
  Synthetic
EDKARKVAEVAEKVLRDIDKLDRESKEAFRATNEEIAKLDEDTARVAERVKKAIEDLAK

SEQ ID NO: 25193 - protein, 61 aa, Artificial Sequence; identical to SEQ ID NO: 25191
  Synthetic

SEQ ID NO: 25194 - protein, 59 aa, Artificial Sequence; identical to SEQ ID NO: 25192
  Synthetic

SEQ ID NO: 25195 - protein, 61 aa, Artificial Sequence
  Synthetic
SEVDEIIKELERLLAEIARENERIIRESRKLADEVRKRNEDAIRKLEELVARLADAVRRKG

SEQ ID NO: 25196 - protein, 59 aa, Artificial Sequence
  Synthetic
KDEVTKVKKVADDVLAEIKKLDDETRRVIEDTNKKIADLDKATRDVVRKVLEEVKKLEK

SEQ ID NO: 25197 - protein, 59 aa, Artificial Sequence; identical to SEQ ID NO: 21407
  Synthetic

SEQ ID NO: 25198 - protein, 59 aa, Artificial Sequence
  Synthetic
SEKLKELRDVIAEVAKRIDELDEYTRESIRRAKKEIERLNRETKKVIEEVVKRIEEERK

SEQ ID NO: 25199 - protein, 59 aa, Artificial Sequence; identical to SEQ ID NO: 21407
  Synthetic

SEQ ID NO: 25200 - protein, 59 aa, Artificial Sequence; identical to SEQ ID NO: 25198
  Synthetic

SEQ ID NO: 25201 - protein, 59 aa, Artificial Sequence
  Synthetic
DAVEEAEKLIRKVIADSEKLLRDLADLNAKSIRRSEKLVEDDRRANEDVIRKLEELRRN

SEQ ID NO: 25202 - protein, 59 aa, Artificial Sequence
  Synthetic
EELLRRIKKLLDEIKKAIEDSSREIKRLLEESERVMKRSSEDIKRTLDDTRRVVEEVRR

SEQ ID NO: 25203 - protein, 59 aa, Artificial Sequence; identical to SEQ ID NO: 25201
  Synthetic

SEQ ID NO: 25204 - protein, 59 aa, Artificial Sequence; identical to SEQ ID NO: 25202
  Synthetic

SEQ ID NO: 25205 - protein, 56 aa, Artificial Sequence
  Synthetic
SSDEVLKEIEEIIRRLEAEVRRVNAEVNASTEDLAREVEEVLRATNELIEELERRV

SEQ ID NO: 25206 - protein, 59 aa, Artificial Sequence
  Synthetic
EEALSKAIKDVRDIVKKVKDELKEWRDRNKELVDRLSEELKEWLKDVERVLKELTDKDR

SEQ ID NO: 25207 - protein, 57 aa, Artificial Sequence
  Synthetic
SEADDVLKKLAETVKRIIERLKKLTDDSRRLVEEVHRRNDKLSKESAEAVRKAEERG

SEQ ID NO: 25208 - protein, 55 aa, Artificial Sequence
  Synthetic
EELSAEVKKLLDEVRKALARHKDENDKLLKEIEDSLRRHKEENDRLLEKLKESTR

SEQ ID NO: 25209 - protein, 57 aa, Artificial Sequence; identical to SEQ ID NO: 25207
  Synthetic

SEQ ID NO: 25210 - protein, 55 aa, Artificial Sequence; identical to SEQ ID NO: 25208
  Synthetic

SEQ ID NO: 25211 - protein, 59 aa, Artificial Sequence; identical to SEQ ID NO: 22001
  Synthetic

SEQ ID NO: 25212 - protein, 59 aa, Artificial Sequence
  Synthetic
EDKVERVVREVEKLHEEDRKRLEESTRSVRKLLEELKRELEKSTRSVKALVDELRERVR

SEQ ID NO: 25213 - protein, 59 aa, Artificial Sequence; identical to SEQ ID NO: 22001
  Synthetic

SEQ ID NO: 25214 - protein, 59 aa, Artificial Sequence; identical to SEQ ID NO: 25212
  Synthetic

SEQ ID NO: 25215 - protein, 59 aa, Artificial Sequence
  Synthetic
SEAEEIRRRLEEISRRSVEHLRKVLEEIKRISERSKRHLDRVLEENARRLEELAELLKR

SEQ ID NO: 25216 - protein, 56 aa, Artificial Sequence
  Synthetic
EEVLRELEELLKESEERIKRIEEEIKKIIDKSREDIKRVLEEIERLNAKAADDLRK

SEQ ID NO: 25217 - protein, 60 aa, Artificial Sequence
  Synthetic
SEVDDVLRRLEELIKTLEDINAKSLEDIKKLIDDLAKILEDALRKHEKLIRELREAKKGI

SEQ ID NO: 25218 - protein, 56 aa, Artificial Sequence
  Synthetic
KEALDRMREEIRRLEEESRKSDETIERLIRELRRRVEEVLKTSTDLIRELEEEVKK

SEQ ID NO: 25219 - protein, 60 aa, Artificial Sequence; identical to SEQ ID NO: 25217
  Synthetic

SEQ ID NO: 25220 - protein, 56 aa, Artificial Sequence; identical to SEQ ID NO: 25218
  Synthetic

SEQ ID NO: 25221 - protein, 59 aa, Artificial Sequence
  Synthetic
SDAEELLKRVADLLKASLESLEKILRDSKELMDRWRKKLEDLLRESEELVDRAEKILRR

SEQ ID NO: 25222 - protein, 55 aa, Artificial Sequence
  Synthetic
ERVREELKKLLTRVEEEHRKVLETDKKILKEAHKESKEVNDRDRELLERLEESVR

SEQ ID NO: 25223 - protein, 57 aa, Artificial Sequence
  Synthetic
DAAERAKEKLDKILEDLRDVVRASKENLDRLHAENAETLERSKANLDRLLEKVKKDG

SEQ ID NO: 25224 - protein, 59 aa, Artificial Sequence
  Synthetic
ERDIERILRELEAVLKKLTDESERLNREVERVSRDTKKKSKELNEELKAVLDEVKRKAD

SEQ ID NO: 25225 - protein, 60 aa, Artificial Sequence
  Synthetic
SEIETVRREIEKILDDLRRTVKRIEDEVRKIHEDLRRSLEDSKRNIEEILKDLERAARRD

SEQ ID NO: 25226 - protein, 59 aa, Artificial Sequence
  Synthetic
KEDIDKLLKELRDLVEKIKKDLKELLERYEEIVRRIKELLKDLNREAEEVVRRLKEELR

SEQ ID NO: 25227 - protein, 57 aa, Artificial Sequence
  Synthetic
KELEDVIEEVKKLLKTVNEESRRVAEEVRKLIREVSEELTEVIRRVERLVEEVAKGV

SEQ ID NO: 25228 - protein, 56 aa, Artificial Sequence
  Synthetic
AETVLRSAEDIVAKNRKLAEEVLRRVKKIVEENRKIASEVLDDVRKLVEDVLARAS

SEQ ID NO: 25229 - protein, 60 aa, Artificial Sequence
  Synthetic
SKLEEVEKAVRKVIEDSRRVNEEVNRRSEEVVRELEKVHREVNDASRRVVEKARRVLKGS

SEQ ID NO: 25230 - protein, 58 aa, Artificial Sequence; identical to SEQ ID NO: 22670
  Synthetic

SEQ ID NO: 25231 - protein, 60 aa, Artificial Sequence; identical to SEQ ID NO: 25229
  Synthetic

SEQ ID NO: 25232 - protein, 58 aa, Artificial Sequence; identical to SEQ ID NO: 22670
  Synthetic

SEQ ID NO: 25233 - protein, 56 aa, Artificial Sequence
  Synthetic
SAEEVKEELKRIATKLKEEIKENIRRLEESVEKIAKELAENIKRLEDILRDVKRGL

SEQ ID NO: 25234 - protein, 56 aa, Artificial Sequence
  Synthetic
GEELVERLRRVVEEVRERLKDSSRELRKINEDSRKAVEDSSAEVAKVVEELERRDT

SEQ ID NO: 25235 - protein, 57 aa, Artificial Sequence
  Synthetic
SEIERVKKRLEELLAEVEESTRRLEERLKRLLEEAKRSSEEVEKELRRLLEAVRRGL

SEQ ID NO: 25236 - protein, 56 aa, Artificial Sequence
  Synthetic
ADDVLARVEELAKRAHDENERLIREVEELVRAHNKRNKELVDEVKRLVEKVIEEER

SEQ ID NO: 25237 - protein, 57 aa, Artificial Sequence; identical to SEQ ID NO: 25235
  Synthetic

SEQ ID NO: 25238 - protein, 56 aa, Artificial Sequence; identical to SEQ ID NO: 25236
  Synthetic

SEQ ID NO: 25239 - protein, 60 aa, Artificial Sequence
  Synthetic
SDVDRVLEEIRKLLEDLKRHSEKVSEENEDLLRANTELNKRVSEDNERLLEELKRLRERG

SEQ ID NO: 25240 - protein, 59 aa, Artificial Sequence
  Synthetic
EEAKKKLDEVLERAKRTIDRLLETSDRSLEKVEADLRRLNEELDRSLERAERTIRELAK

SEQ ID NO: 25241 - protein, 60 aa, Artificial Sequence; identical to SEQ ID NO: 25239
  Synthetic

SEQ ID NO: 25242 - protein, 59 aa, Artificial Sequence; identical to SEQ ID NO: 25240
  Synthetic

SEQ ID NO: 25243 - protein, 55 aa, Artificial Sequence
  Synthetic
STEDVLRKIKEDVKRVIDDNRRILDEVRRTSKRVLDDLRANLKHIAEEVERVLRG

SEQ ID NO: 25244 - protein, 56 aa, Artificial Sequence
  Synthetic
SKELLEKAKAVVDEIKRLAEESLKRLEDLSRDHKRRAKELNDEIAKVVDELAKRAT

SEQ ID NO: 25245 - protein, 60 aa, Artificial Sequence
  Synthetic
SAEELLREVAELVKRVDEDLRRLLEEVRASNEEVIRRLEEILKRIEEENRKVVEELRRGG

SEQ ID NO: 25246 - protein, 59 aa, Artificial Sequence
  Synthetic
EETVKRLLDELRELLERLKRTIEELLKRNRDLLADAEEKARRLLEENRKLLKAARDTAT

SEQ ID NO: 25247 - protein, 59 aa, Artificial Sequence
  Synthetic
SEDEDLDRVAEKLAREHKKSVEEIKRVLKSADEESKKLVRDTERVIEEIKREVEEARRG

SEQ ID NO: 25248 - protein, 55 aa, Artificial Sequence
  Synthetic
EEVLKKLAEIVRRVKEENRKVNEEVEKRLRELEEENKKVIEDLKSTVEELVERLR

SEQ ID NO: 25249 - protein, 59 aa, Artificial Sequence; identical to SEQ ID NO: 25247
  Synthetic

SEQ ID NO: 25250 - protein, 55 aa, Artificial Sequence; identical to SEQ ID NO: 25248
  Synthetic

SEQ ID NO: 25251 - protein, 60 aa, Artificial Sequence; identical to SEQ ID NO: 23529
  Synthetic

SEQ ID NO: 25252 - protein, 56 aa, Artificial Sequence; identical to SEQ ID NO: 23530
  Synthetic

SEQ ID NO: 25253 - protein, 57 aa, Artificial Sequence
  Synthetic
SKEDRLREELKKLLARLAEEIERLKRALEESNKDLKRTIDASEKHLRDVNEDVKRGG

SEQ ID NO: 25254 - protein, 59 aa, Artificial Sequence; identical to SEQ ID NO: 24672
  Synthetic

SEQ ID NO: 25255 - protein, 57 aa, Artificial Sequence; identical to SEQ ID NO: 25253
  Synthetic

SEQ ID NO: 25256 - protein, 59 aa, Artificial Sequence; identical to SEQ ID NO: 24672
  Synthetic

SEQ ID NO: 25257 - protein, 60 aa, Artificial Sequence; identical to SEQ ID NO: 24699
  Synthetic

SEQ ID NO: 25258 - protein, 59 aa, Artificial Sequence
  Synthetic
RETAERARETLKRLLDENRDRSKKVKEEIRRILEDLTRTTERVKREIAKLLKELEDTAR

SEQ ID NO: 25259 - protein, 60 aa, Artificial Sequence; identical to SEQ ID NO: 24699
  Synthetic

SEQ ID NO: 25260 - protein, 59 aa, Artificial Sequence; identical to SEQ ID NO: 25258
  Synthetic

SEQ ID NO: 25261 - protein, 58 aa, Artificial Sequence
  Synthetic
SELEEVLRRIEALVRKAHKENEDVLREIERLVRTAHRLNKKVDDDSAKIAEDLKRGGR

SEQ ID NO: 25262 - protein, 58 aa, Artificial Sequence
  Synthetic
EAVRRLKEILERLKEEVRRSLEELRKEVERLKKEVEDSLRELKKSLEEWVKSLEEATR

SEQ ID NO: 25263 - protein, 58 aa, Artificial Sequence; identical to SEQ ID NO: 25261
  Synthetic

SEQ ID NO: 25264 - protein, 58 aa, Artificial Sequence; identical to SEQ ID NO: 25262
  Synthetic

SEQ ID NO: 25265 - protein, 56 aa, Artificial Sequence
  Synthetic
SKEEELEKLLREHHEKIKRLKEESKRINDRIRRTVEELIKESEKINRDINDTVRKG

SEQ ID NO: 25266 - protein, 56 aa, Artificial Sequence
  Synthetic
EDSVERIARELERNLDDLARVLKESEDDLAEILRRLKEVLEESERDLERVEREVRK

SEQ ID NO: 25267 - protein, 59 aa, Artificial Sequence
  Synthetic
SEAEEAAERAKRAAKEAVERAKRAVERNEEAARRAAEKAREATERAERAARRAADKARK

SEQ ID NO: 25268 - protein, 60 aa, Artificial Sequence
  Synthetic
IKDAADKLAEAAKRAVDISKKAADDLKRLAKEDNEIAREAARRLAEAAKEAVKLVDDVTR

SEQ ID NO: 25269 - protein, 56 aa, Artificial Sequence
  Synthetic
SEKEKAAEDLRRAIEEAKKRSEEAAKELEDALRKAEKEARDSAETLKEAAKRAADA

SEQ ID NO: 25270 - protein, 59 aa, Artificial Sequence
  Synthetic
KDAATEAKKAADTIAKLIEDNAKRALEAAREIAKLIEKSAKEALEAAERIARLIEEAAN

SEQ ID NO: 25271 - protein, 59 aa, Artificial Sequence
  Synthetic
SVEEAARRAAKALKDAAKKLLEANEKAARAWKELAKELIKADEKALKILEEAARKARRD

SEQ ID NO: 25272 - protein, 57 aa, Artificial Sequence
  Synthetic
AEEAAKEAIRIAEEALRRSAEAAERAARIAEDAARKSRKAAEDAAKIAKEAADRARK

SEQ ID NO: 25273 - protein, 62 aa, Artificial Sequence
  Synthetic
SEEDRLRELAERARRLAKRNRELAKEIIDEIRKLIRDAREAAKKSAEKAKRLIDDARRVAGK

SEQ ID NO: 25274 - protein, 56 aa, Artificial Sequence
  Synthetic
IEEAAKANEEAIKASEEAVDEAARALEEAAEASKRANEKADKALEDAVRAAEEATR

SEQ ID NO: 25275 - protein, 61 aa, Artificial Sequence
  Synthetic
SEKEDVLRRIREAHERNKRLLERVAEEIKRIVEESRKLLEDVRKKAEDAARRAEEALRKEA

SEQ ID NO: 25276 - protein, 56 aa, Artificial Sequence
  Synthetic
KEALLKAAKEALEALEEALRLIAKATEEAARAAKEALDLILEADRKSAKAAEEALR

SEQ ID NO: 25277 - protein, 61 aa, Artificial Sequence
  Synthetic
SEREEVAKRATDAHEENERLLREVEKRIKEALERNEELLKRVSDKAREAAKKLEDALRRRA

SEQ ID NO: 25278 - protein, 56 aa, Artificial Sequence
  Synthetic
KEALRRAAKKALDAAEEALELIRKASKEAADAAREALKLILEADKKSLEAAREALR

SEQ ID NO: 25279 - protein, 60 aa, Artificial Sequence
  Synthetic
SEREEIEEIKKRVDRTLEEYERKVEDIRRKLTELKDESDKKVKDVRRKLKETEDRVREEG

SEQ ID NO: 25280 - protein, 58 aa, Artificial Sequence
  Synthetic
EELRELIERLVRIAEEVSEEDERVLRSLEDILRKVVEENERLLERLKRILEELIRRTR

SEQ ID NO: 25281 - protein, 58 aa, Artificial Sequence
  Synthetic
SEDEELKKELEKLLKELEEKLEKYRDDLRKDKERLKEKLDRYRERLRELMEELKDLLD

SEQ ID NO: 25282 - protein, 59 aa, Artificial Sequence
  Synthetic
EDVLRDIVRRVVEVLRKNLKIVEEIIRKIEELLEKNLRLVEEILRRIARLLEEVLEKTR

SEQ ID NO: 25283 - protein, 60 aa, Artificial Sequence
  Synthetic
SDAEVIEELVRLHRKLLEDILKLLKELVDIHRETLRRIEEIVERIVRLIEALLDKIRKEG

SEQ ID NO: 25284 - protein, 59 aa, Artificial Sequence
  Synthetic
KEALERLLERLKEIVDRIKEELDRLLKRSEDSIREIEERVKRLLEESKRVVDEIRERLK

SEQ ID NO: 25285 - protein, 57 aa, Artificial Sequence
  Synthetic
SKEKKILDRLRELLKESRDLNRRVKETLKKLLEDSKRLLDEIRKRLKELLDELEKEN

SEQ ID NO: 25286 - protein, 55 aa, Artificial Sequence
  Synthetic
EAVKRLKEVLDEVAELVKTLLEVNRKILEDVDKLIEEVLKLNDDILREVVKLAED

SEQ ID NO: 25287 - protein, 61 aa, Artificial Sequence
  Synthetic
SEKEKLLEDIADIARKILKLLKEHLDKLRKLLEEIRRLLEEHSRVLRELIERILDALRRKK

SEQ ID NO: 25288 - protein, 55 aa, Artificial Sequence
  Synthetic
KDLERELKRVKEISRKLEEELKELKERVKRDSEKMNEDLDRLLEDAERRIRKTRE

SEQ ID NO: 25289 - protein, 59 aa, Artificial Sequence
  Synthetic
SEEDKVLEELKRLLEELLRKHEEVLKEIKELLDKIIKKHEESLRRIKKLAEEIKERAKK

SEQ ID NO: 25290 - protein, 59 aa, Artificial Sequence
  Synthetic
KTLTEELKRIEDKLEELIRRSKDELDKIVREAEKIIEESKRRLEKLLRELERIIEDAKR

SEQ ID NO: 25291 - protein, 60 aa, Artificial Sequence
  Synthetic
SELEELVKRIEKTLRDLRRKNEELRKEVEEVEREDRERLERAAEDLERVEKKVEDEVRRR

SEQ ID NO: 25292 - protein, 57 aa, Artificial Sequence
  Synthetic
IEKTIEDARRLLEKILKLHRENSEESRRLIEDINRVNRELIDEVAELAKKILRRVEE

SEQ ID NO: 25293 - protein, 61 aa, Artificial Sequence
  Synthetic
RDEELLERVERLLRELLDTNRRKLEEVEKELRRLLETNKKTLDDVRRLLKELLDVLETREV

SEQ ID NO: 25294 - protein, 55 aa, Artificial Sequence
  Synthetic
DDLRELKKRIEDLLKEDKERLEKIARDIERDLERYRRDLKRLEDELREDIERARR

SEQ ID NO: 25295 - protein, 58 aa, Artificial Sequence
  Synthetic
REEEVLRRLREIIKRLLDKNRKVNEDLVRLIKRVLDKNREVLKRLRDLIRELLEVVRN

SEQ ID NO: 25296 - protein, 60 aa, Artificial Sequence
  Synthetic
DEDLERALKKVKDELERIVRENEDADRKIKEEVDRLSEENEKVNREIKKELDDVVEETKK

SEQ ID NO: 25297 - protein, 56 aa, Artificial Sequence
  Synthetic
EEDERLTKRVEEIKRENRELLRRLEEEVKELERKSEKIVRDLKEKVDRAKEKLDSN

SEQ ID NO: 25298 - protein, 57 aa, Artificial Sequence
  Synthetic
DKDVLTELKRILDELLKLVEKLIRRNLRLLEELLRLVREILRTSNEILEEILKDARR

SEQ ID NO: 25299 - protein, 60 aa, Artificial Sequence
  Synthetic
SELDTLVELIKRILEEITRVNKELVDEVRKLLEEIVRINERSVRTIEKILRDIAELIRRG

SEQ ID NO: 25300 - protein, 60 aa, Artificial Sequence
  Synthetic
EEELEKELRRLKKELEEVVRKSREDLERLKKELEKIVKESEDELKKVEEKVKKLADDARR

SEQ ID NO: 25301 - protein, 58 aa, Artificial Sequence
  Synthetic
TEEEVLRKVEKLIKDLLDVLRDLLRASEEVVREALRVLEELIEENKRVIEELSRALSD

SEQ ID NO: 25302 - protein, 60 aa, Artificial Sequence
  Synthetic
ERKLRRDLTETKKELEKRHEDLRRELEKLLRDYKRELEEIERRLEEIEKTLKRRADETRR

SEQ ID NO: 25303 - protein, 58 aa, Artificial Sequence
  Synthetic
SDLERLEKEIRDLLDELRRLTEELEKRSRDILKRLKEILEELKRRIERLLDELRRRRG

SEQ ID NO: 25304 - protein, 58 aa, Artificial Sequence
  Synthetic
DSVRELIEVLKKALEDVRRVLRAIEEIVRRSVELNEKHSRELRRVLKELLELVAKAAE

SEQ ID NO: 25305 - protein, 55 aa, Artificial Sequence
  Synthetic
SEEEELRKLAKKIEEVIKTSRDKLDKSRKELEKVIRDIERRLRELRRELEELVRR

SEQ ID NO: 25306 - protein, 57 aa, Artificial Sequence
  Synthetic
REDVLREIEKLLEEILRALRKLLKDLLDLHDEVLKADEKLLKRLREIVKKVLEEVRK

SEQ ID NO: 25307 - protein, 55 aa, Artificial Sequence
  Synthetic
SEEEKLRELRKRLEDTVRRSKEELEKSTEELKDVIKKSEEKLEELKRRLEEMKRR

SEQ ID NO: 25308 - protein, 57 aa, Artificial Sequence
  Synthetic
SEKLLTDAARILDDVVRVDRELLRLVLELHKRLVRADEKLLTDIRELARRVLEETRK

SEQ ID NO: 25309 - protein, 59 aa, Artificial Sequence
  Synthetic
DEDERLRELRDRVRRSEEEDERRNKRHEERVKELEDEDKERNERHRKRLKEITDRLKER

SEQ ID NO: 25310 - protein, 55 aa, Artificial Sequence
  Synthetic
EDLLKVVRDSLEILKELIRTVLKAIEESLRILEELIERLKRHIETILRLAAETTT

SEQ ID NO: 25311 - protein, 59 aa, Artificial Sequence
  Synthetic
DEEELEKEIKKLLEEATKKHEDVKREIKERLEKLRRDHEEAEKRVRDELRRLEEELERR

SEQ ID NO: 25312 - protein, 55 aa, Artificial Sequence
  Synthetic
EDLIRVLKKLIEDLERLLTKNRRLLEEIVKILTKLLKDNRDLLRRILRKVEETAK

SEQ ID NO: 25313 - protein, 57 aa, Artificial Sequence
  Synthetic
DEARRIKEIVDRAVEIWRRLVEEIKRIVKEVLDKWRKLIRELIELVRKALEDLRRTN

SEQ ID NO: 25314 - protein, 58 aa, Artificial Sequence
  Synthetic
DELKRLEDDVRKKLKDLEDKLRKLRKELEETHRRLAETIRRIAEELERLHRELKRESK

SEQ ID NO: 25315 - protein, 57 aa, Artificial Sequence
  Synthetic
SKDERLRKVLEDVERLLREVLKKHRKVIDDLRELLKRVVEIHRRVLEEILKRLEEEG

SEQ ID NO: 25316 - protein, 59 aa, Artificial Sequence
  Synthetic
DEVVERIRRTLEEIERRLRKTDKDLEKDLRELKKDLDRTDEELKRKVEKLKRELKETSK

SEQ ID NO: 25317 - protein, 61 aa, Artificial Sequence
  Synthetic
DEKDRLEEEVRKLLKEAEDELRRLKRENEKLNRELKETLKRVKEESERLLRKLREDVRKDG

SEQ ID NO: 25318 - protein, 57 aa, Artificial Sequence
  Synthetic
LEEVLEELDRLNKEVLKAIEEAAKKLEDLNRRVLEVLEDILRKLKEIVDEALKVLRK

SEQ ID NO: 25319 - protein, 59 aa, Artificial Sequence
  Synthetic
KEEELLERLREVLKTDLDLLRDLVRTLKEDLDKDARLLEELVERLKKLLDKIKRLLEEE

SEQ ID NO: 25320 - protein, 56 aa, Artificial Sequence
  Synthetic
ERVKREIRKDLDKIRREIEKIVKESEESNERSLEKIDRILEESKRRNERLKRELDR

SEQ ID NO: 25321 - protein, 60 aa, Artificial Sequence
  Synthetic
SKKETIRKLIEENKDIIRKLAEKLKRLLEESERIAEEALRLIKELLERIERALRRVAKDI

SEQ ID NO: 25322 - protein, 55 aa, Artificial Sequence
  Synthetic
KELEKLLEDLEREIRRLKKRLKELSDRLEEKIRKIKRELDDLSRRLREKIERTRK

SEQ ID NO: 25323 - protein, 60 aa, Artificial Sequence
  Synthetic
DDEKRLKDRLREALKRNEELLDRLRRRVEEILDRNRKLLERVRRELERVLKELEDLIRRG

SEQ ID NO: 25324 - protein, 56 aa, Artificial Sequence
  Synthetic
ETVLRELVEELERVVRRILELLKRLSDASKRVVEEILELLRRLSEKTAKAVDDTRT

SEQ ID NO: 25325 - protein, 56 aa, Artificial Sequence
  Synthetic
DDERRLETLIRLSRELIERVRKLLRDIIRTSKELIEEVLETVKRILDKIEELAKEV

SEQ ID NO: 25326 - protein, 55 aa, Artificial Sequence
  Synthetic
EKISRKVEELEKEIRRLIEELKKKNEEVEKKIREIMKELDERSERLRRELDRTRD

SEQ ID NO: 25327 - protein, 60 aa, Artificial Sequence
  Synthetic
SKEDELRKELEEVVKRIEDALRKLKERSKRVAKRVKKLLDDLKKESEEVVESLREKLEKE

SEQ ID NO: 25328 - protein, 59 aa, Artificial Sequence
  Synthetic
ESVRKLLEELRRLHERIIKIIEEILELLRRVHKEVAKDVRRLARELEELVRRLVETLRR

SEQ ID NO: 25329 - protein, 58 aa, Artificial Sequence
  Synthetic
SAEEILDTVAELIKTHLKIVREVLKTVRDLNRRSLDLIRRILERMRRLVERLVRLIRN

SEQ ID NO: 25330 - protein, 56 aa, Artificial Sequence
  Synthetic
EKRLREVEEEVERRLDTVRRELEEVEKESDRLLEELEKKSEDFERDIRRLLKEAKT

SEQ ID NO: 25331 - protein, 56 aa, Artificial Sequence
  Synthetic
SKREEIEKLLEDLKRDNKRVLDRLREVIKDNEDKNEKAVRDARELLERLKRELEEG

SEQ ID NO: 25332 - protein, 55 aa, Artificial Sequence
  Synthetic
EALKRLEEVAKELLKLIEEVLKENERSNREILRLIAELVKRNARVNEELLEIARR

SEQ ID NO: 25333 - protein, 61 aa, Artificial Sequence
  Synthetic
EKDDRIREKVKEIERRNDKALDDIRRRVEEIKRENDEVLDRIRKELEDLKKEVEEVAKRTG

SEQ ID NO: 25334 - protein, 59 aa, Artificial Sequence
  Synthetic
EELKKLLDKLLEDLRRIVKKLEELLKKNDDELRKIVKEVKDLLKRNHDELERIVREARR

SEQ ID NO: 25335 - protein, 61 aa, Artificial Sequence
  Synthetic
SKEEKIERDVDEIRKENEEVLRRIRKKVRDIERENDEILRKIEEDLRRIEKDLERVAKERG

SEQ ID NO: 25336 - protein, 59 aa, Artificial Sequence
  Synthetic
EDLRELLRKVLESLRRIVERVDRTLKDNDRKIEEIVRELKELLKKNNDALRKIVEDAKR

SEQ ID NO: 25337 - protein, 59 aa, Artificial Sequence
  Synthetic
SREEVFELLLDVLRKIVELIKDLAKKNIDVLKKLMELIDELVKINEKSLEDLLRLIREG

SEQ ID NO: 25338 - protein, 56 aa, Artificial Sequence
  Synthetic
EKELEDEARRLKKEYRDEVERLKKEIREIIERYKDALRKLEREIEDITRRLKERAD

SEQ ID NO: 25339 - protein, 62 aa, Artificial Sequence
  Synthetic
SKLEDLLRRAEELLKDIVRANERLLEEIRKLLKEIVKANEDLLRKVKRLLEEAVEMAIRERG

SEQ ID NO: 25340 - protein, 56 aa, Artificial Sequence
  Synthetic
EEIVTRVRKKVEELKEEVKRINDEVRKKVRDLEETSKRILERVEDLVRELKERARR

SEQ ID NO: 25341 - protein, 59 aa, Artificial Sequence
  Synthetic
SKEDKARELEKRLRDNLKKLEEVVRELAEVLKRNLEKLRRLAEELLRALKRLLDKLRAG

SEQ ID NO: 25342 - protein, 56 aa, Artificial Sequence
  Synthetic
EDLVRDIRRELKELEERARKILRDDERDLRALEKRIRDIIREDREELERLKERARK

SEQ ID NO: 25343 - protein, 60 aa, Artificial Sequence
  Synthetic
KREDILKKLEDIIRDIIDKLRRILEKVKRLNEDIIREIKRLLDESLKTLEDLLKRIADKS

SEQ ID NO: 25344 - protein, 58 aa, Artificial Sequence
  Synthetic
EEIKRLKEELERRHRRLEEEVERVARELEKRHRDLERDIRRVAEELKKLLKKLRDDRR

SEQ ID NO: 25345 - protein, 57 aa, Artificial Sequence
  Synthetic
REKEELSEEIRRRLDELRKLLEEYEEEVKRLLTRLRDKLRRYKEEVERLLRKLKEDN

SEQ ID NO: 25346 - protein, 55 aa, Artificial Sequence
  Synthetic
KEAVDLVRDVLRRVEKVNRELLELIKEVADRVRERNKELVELIDRLLERLKRADK

SEQ ID NO: 25347 - protein, 60 aa, Artificial Sequence
  Synthetic
SEEETVERLLEEARKRHEEIIKKAKELLDRAREEHERIIREAEKLLEEIKKRVDELVRDG

SEQ ID NO: 25348 - protein, 56 aa, Artificial Sequence
  Synthetic
RKTLLREIEKLLKTLEDILRDLLRLVEKTLKELEEILKDLVDKARENLKRLRERIR

SEQ ID NO: 25349 - protein, 57 aa, Artificial Sequence
  Synthetic
SKEEEIVKEVEKIVEKLLEVNRRALERIEEIVRKNLKVNRELVEEIERIVEELIRTG

SEQ ID NO: 25350 - protein, 56 aa, Artificial Sequence
  Synthetic
EEMLRRVLKKIEEVIRRAREEHEKSTRELEEVIKELKKRHEDVTREAKKVIDDLKR

SEQ ID NO: 25351 - protein, 56 aa, Artificial Sequence
  Synthetic
SEKEELKRLLDKLLKELKRLSDELKKTIDKILKILKEVSEEVKRTADELLDAIRRG

SEQ ID NO: 25352 - protein, 59 aa, Artificial Sequence
  Synthetic
EDELRKVEEDLKRLEDKLKKLLEDYEKKVRELEETLDDLLRKYEETLRRLEKELEEEER

SEQ ID NO: 25353 - protein, 56 aa, Artificial Sequence
  Synthetic
SRVERLEKLLEEHKRLVEDLIRLLDELAKKHDEDVRRLIERLKELAERLKRLLERS

SEQ ID NO: 25354 - protein, 56 aa, Artificial Sequence
  Synthetic
KRDVDRIREEIKKLIEDVRREIKRVEDKHKKDIDRVKEKLDRVRDRHEKMAEDSKR

SEQ ID NO: 25355 - protein, 60 aa, Artificial Sequence
  Synthetic
REKEELLRLLKEIAERILDILRKALELLDRVVELDNRTSKELLELSAELVKRILEAVRDG

SEQ ID NO: 25356 - protein, 60 aa, Artificial Sequence
  Synthetic
EEEKKRLLDDLRRILREYEERVKKLNDEHKKLEKEIKDKVKRILDEIRRTLDKILKELRK

SEQ ID NO: 25357 - protein, 60 aa, Artificial Sequence
  Synthetic
KDEERLVKKIRDSLRKYEDLLRKLVERIRDLLRRYEEELRKLLTEIEKTLEDVRDVLRRK

SEQ ID NO: 25358 - protein, 58 aa, Artificial Sequence
  Synthetic
DLLEMLRRLVERLKRLIERVLKLNRELVKKLLELLEEALRRNRRLVEDILKIADEARK

SEQ ID NO: 25359 - protein, 58 aa, Artificial Sequence
  Synthetic
SDEDRKRKKLEDVERRLEKLLREYEEKVRRVLEELRRLLEENKRHVEELEKRLRDRAK

SEQ ID NO: 25360 - protein, 56 aa, Artificial Sequence
  Synthetic
LEEALERLRRLLEELLRINERIIELIRELLEDNRRILEEILKLIKDLLRRAERIVD

SEQ ID NO: 25361 - protein, 56 aa, Artificial Sequence
  Synthetic
SEEEDLEREKRRLDKYSEDDRRRAEKVLRELEEEVKKSRKRLEDAKRRLDEEVRRN

SEQ ID NO: 25362 - protein, 59 aa, Artificial Sequence
  Synthetic
EEVLRILKTLVKELEDILRELLKINEDLVRRLERILRELLKSNDNLVKELEKLLEKARR

SEQ ID NO: 25363 - protein, 63 aa, Artificial Sequence
  Synthetic
EKKERIREALERAVRTLEKLLEDDKRELDKARREVRELLRRDKEELDKVVERVERELDRARER

SEQ ID NO: 25364 - protein, 58 aa, Artificial Sequence
  Synthetic
RKLEEILRLLEEALRRNSETLEEILRKLEEILKRNRKTLEDLLKLVKEILDEIRERLR

SEQ ID NO: 25365 - protein, 59 aa, Artificial Sequence
  Synthetic
SLTERVLDLARDLIRILLEIHKRALKLIAELVKKLLKIHEDVLKLSEELVEELLEIVAR

SEQ ID NO: 25366 - protein, 60 aa, Artificial Sequence
  Synthetic
EDTLRRVLERIREEVERVKEKHRRLLEELKKLLEELRKRSKDLLEDIKRKVRELEEKTRR

SEQ ID NO: 25367 - protein, 60 aa, Artificial Sequence
  Synthetic
REDEELTKRVEKILRDAERLVRKLHRENREILKTLKRLVEELEKENRKVLKDAEDLVRKE

SEQ ID NO: 25368 - protein, 56 aa, Artificial Sequence
  Synthetic
ARELLKELKRIVKKSLDELRKLLKKLEDIVRESNERLKEVLKKITDLIRKVLEDIR

SEQ ID NO: 25369 - protein, 58 aa, Artificial Sequence
  Synthetic
SEEDKIAEELKETLKRYRDRLEEIRKELEDKLREYEKRLEDLARELEKKLRKLEARDV

SEQ ID NO: 25370 - protein, 55 aa, Artificial Sequence
  Synthetic
EDVRRVVRELLRKLEDILRESEETNKETLEKIDEILKESERTNREVIRKLKETTD

SEQ ID NO: 25371 - protein, 56 aa, Artificial Sequence
  Synthetic
SAEETLRRITEESKRVLEEITKKYEDLERESREVLRKLREDLDRIKRELEDVLTKG

SEQ ID NO: 25372 - protein, 60 aa, Artificial Sequence
  Synthetic
RERLARLLKKLADKLIRVLEEILKINEELNRKIIKFARENLERNRRVNKKVIEVLREAAR

SEQ ID NO: 25373 - protein, 56 aa, Artificial Sequence
  Synthetic
SEDEKLKKEVDDVLERAKRLLDRLREANEDVLRKAKEDLDRLLKSNREILEELRKI

SEQ ID NO: 25374 - protein, 56 aa, Artificial Sequence
  Synthetic
ERVLERLLKALKEHSDELKKVVEELLKLLEEHLREVEKLVRELLADLKRLLDKTRK

SEQ ID NO: 25375 - protein, 61 aa, Artificial Sequence
  Synthetic
SKIEELLTKLAELLKEVIDELRKNLKRLEETVDENLKTMEDLLRKLEEVVREVLDIATKKN

SEQ ID NO: 25376 - protein, 55 aa, Artificial Sequence
  Synthetic
DEVRKRLDERAERLEKEVEEVKKENDERAKRSAEEVKKLLDKLDEALRRLEEEVR

SEQ ID NO: 25377 - protein, 61 aa, Artificial Sequence
  Synthetic
SEDDELIKKIKKLAEEIIDEIRKLIEKSKEILKRLLDELRKLIEKSKKLLKETLDKLRKDK

SEQ ID NO: 25378 - protein, 56 aa, Artificial Sequence
  Synthetic
EEALKELEKKTRDLEDEIRKVKDDVKRRHDELKEEIERVLDELRKVLKRLEDEARK

SEQ ID NO: 25379 - protein, 61 aa, Artificial Sequence
  Synthetic
KTEEILKRVKEILDELAKELRDIIRESLRTIEELLDELRRILEESERTLEELVKTIKDEVK

SEQ ID NO: 25380 - protein, 59 aa, Artificial Sequence
  Synthetic
DEVKRRLEEKERRIRTRYEELRRRLRKRVKDYEDKLREIEKKVRRDAERIEEELERAKK

SEQ ID NO: 25381 - protein, 57 aa, Artificial Sequence
  Synthetic
EELEDVLRRIEEVLREIIRLLEEHHDMVRRAVERIKRLLEDHHKKVEDILREIKRRI

SEQ ID NO: 25382 - protein, 59 aa, Artificial Sequence
  Synthetic
EKVKKELKDLARKAEKLSEDVRRELEETVKDLRRKSKEVEDRLDKLTEEIRRTLEEKRR

SEQ ID NO: 25383 - protein, 59 aa, Artificial Sequence
  Synthetic
KDEERLTKTAKESLDHNKELLDRIRKKSKEVLDHNKELLDRIREEIKRLLEELDRLKRE

SEQ ID NO: 25384 - protein, 56 aa, Artificial Sequence
  Synthetic
VEEVIKEVKKMLERALEELREVNDRDRRANERALRILEALNEEDKRATKRVLERKK

SEQ ID NO: 25385 - protein, 60 aa, Artificial Sequence
  Synthetic
REKEELLKLIKRVIELLKRVLEEHLRLVEDVIRRLKELLDSNEKIVREVIEDLKRLLDEV

SEQ ID NO: 25386 - protein, 59 aa, Artificial Sequence
  Synthetic
EDLLRKAKKVITEVREKLKRNLEDVRRVIEDVKRKSRRILEEARRLIEEVERELEKIRK

SEQ ID NO: 25387 - protein, 58 aa, Artificial Sequence
  Synthetic
SKVERILRLIEELLRLLREALRKIHRINEELIRTLEEVLREIHRINEDLNRKLREATG

SEQ ID NO: 25388 - protein, 59 aa, Artificial Sequence
  Synthetic
EELKDRVREELDRSRKKLRKLEEEMRRKLKRSREELKKLEEDLRRELKKLREELERIRR

SEQ ID NO: 25389 - protein, 57 aa, Artificial Sequence
  Synthetic
SRKERIKRALEEHIRKLKEITDEVRKTNEELLELTRRILEEAKKANEELVKKIREAL

SEQ ID NO: 25390 - protein, 56 aa, Artificial Sequence
  Synthetic
EEALKELEEKLDRYRRKLEDLLRKYAKKLEDYKRKVKKLEEENEELLKRIEKEMEK

SEQ ID NO: 25391 - protein, 56 aa, Artificial Sequence
  Synthetic
SEKEELEKRLRKKLEEIKELVERYKRRLEELLRRHREELKEIEKRLEDLERKIEEL

SEQ ID NO: 25392 - protein, 55 aa, Artificial Sequence
  Synthetic
EEVKKIIEELLRLAEEVLRRNKRLIEALLELHEDEFRKVEEIIKELSEEAKRASK

SEQ ID NO: 25393 - protein, 57 aa, Artificial Sequence
  Synthetic
REKEKIREALETNLRLLEELIKRLKEILDTHNELLRRVIETLERLLKELLELLEEAG

SEQ ID NO: 25394 - protein, 56 aa, Artificial Sequence
  Synthetic
KEDLERLRRKVEELEDRLRRLLEKLKRDSDELMRELERILDRYRRESEELDRRLAE

SEQ ID NO: 25395 - protein, 58 aa, Artificial Sequence
  Synthetic
SELERLRKILDDLRKKVERVAEEHKRANDKLAEEIRRVLKTHREMNERAIEEVKRTVG

SEQ ID NO: 25396 - protein, 55 aa, Artificial Sequence
  Synthetic
REVDKRLRELLEEHKKLVDDLDKRARKVHKEHKDKVDKLREELEKTLRDIKRETD

SEQ ID NO: 25397 - protein, 60 aa, Artificial Sequence
  Synthetic
DSDEIVKTLLEKLRRILKEVEEIARENHKRDRDANREINKLVEDIARRLEEVAERLREVI

SEQ ID NO: 25398 - protein, 59 aa, Artificial Sequence
  Synthetic
EKDLRRLRKDIERLKEEVKRALDELRKKYKKIEDDNRRLVERIRRELKKILDELDEKRQ

SEQ ID NO: 25399 - protein, 58 aa, Artificial Sequence
  Synthetic
SEIEKVLEINRRVLKELERIVKKVLDIDKEAAELLRDIIRRVLEIIKKVIDDIIRTRG

SEQ ID NO: 25400 - protein, 59 aa, Artificial Sequence
  Synthetic
KDLEEKLRRVLEELKRLVDDLRRLIDEIKKRYERMVEELKKEIERVLRENEEAVKDLER

SEQ ID NO: 25401 - protein, 59 aa, Artificial Sequence
  Synthetic
SEEEELEKIAREVLRELKEILEELDDIYRRVTDRLRKLLERLKKEYEEVKKELEDLKRR

SEQ ID NO: 25402 - protein, 56 aa, Artificial Sequence
  Synthetic
EELVDRLIKLLDENLKRSEEVIREIIELARKNAEDSRRVIKKIIELLREMLKDARR

SEQ ID NO: 25403 - protein, 62 aa, Artificial Sequence
  Synthetic
DSERELEKVLKDAKEKLDRSLEEVKKVTRETEKRIEEIDKEVKEVLEEADRRVKKIETDKER

SEQ ID NO: 25404 - protein, 56 aa, Artificial Sequence
  Synthetic
ERLIREIKRIIERVIEILKDIAKEILDLDRESVRLDTEVLKKLLDIIREVVKEAKK

SEQ ID NO: 25405 - protein, 62 aa, Artificial Sequence
  Synthetic
DEEREVRKVLRRAEELLRRSLKKAEEVTRETRKRIKELLDELRKVLERAERELRRIRREKER

SEQ ID NO: 25406 - protein, 56 aa, Artificial Sequence
  Synthetic
DRLIEEIKRILEEIIKLIADLARRVLKIDEESVKLDEDNLREVLKILEDVVRDSER

SEQ ID NO: 25407 - protein, 56 aa, Artificial Sequence
  Synthetic
SEEEEIKKDLERLIDKLRRTSKRLIDDYRRVLEELERTIKRLLEELEELIDELRRR

SEQ ID NO: 25408 - protein, 59 aa, Artificial Sequence
  Synthetic
EKVERALERILELLKRVIEELERLAEEVLRLSKRVAEENKKLLEEILRILEEIIRRAKK

SEQ ID NO: 25409 - protein, 62 aa, Artificial Sequence
  Synthetic
SKEEELEKLVRKVEEDLKRLEEESERIKKEIKDTLRKIRKRSEDLKRKVKELLRRLEEEARR

SEQ ID NO: 25410 - protein, 60 aa, Artificial Sequence
  Synthetic
VDEALEMLKRLLDKALKVHEDVLRKLVELVDEVLKVHEESLRKLLTLAKKVLEVLRKITK

SEQ ID NO: 25411 - protein, 60 aa, Artificial Sequence
  Synthetic
DDERRKLEDLERMVEELKRKSDKLLKEIREEVERLERETRKLLEELKRKVDELREDLRRN

SEQ ID NO: 25412 - protein, 55 aa, Artificial Sequence
  Synthetic
EDLEKAERLVKDILRLNEEHTKELEDVVRDLLRKLEKHTRDLEKLVKDALDKVKT

SEQ ID NO: 25413 - protein, 60 aa, Artificial Sequence
  Synthetic
SEKEELLKRLEDVLRRIKERLDELRRRYKKALDELREESKRLIEKLDKVLREIEELIKRK

SEQ ID NO: 25414 - protein, 59 aa, Artificial Sequence
  Synthetic
EEILRLLLELLEESIRVAREVNRLLLRLLEKNKELVEEVLKRLLDLLKKIIDIVREVIT

SEQ ID NO: 25415 - protein, 62 aa, Artificial Sequence
  Synthetic
SKIDEALKKLRKILEDAIKLNKELNDTTREILKEIIKLNREVLEKIRRILKELVDLILKDLK

SEQ ID NO: 25416 - protein, 55 aa, Artificial Sequence
  Synthetic
EELRRVVEKVRKELEDDKERYKRLEEEVRRLLEEMKRRSEDLERKVEEILRRLTE

SEQ ID NO: 25417 - protein, 58 aa, Artificial Sequence
  Synthetic
SEKELLEDLRRKAKEVKDRHEELLRDLERTLKKLKDEHDKKLKDLRDELRRVEKKLDD

SEQ ID NO: 25418 - protein, 55 aa, Artificial Sequence
  Synthetic
KELLKEVKDLLRKLEKVVRDSLELLKRLLEDIEKRVRDSNRELKRILDDIEKKAK

SEQ ID NO: 25419 - protein, 57 aa, Artificial Sequence
  Synthetic
DKEEELLKKLEEVLKKAEDLIRESNKALKELLDEAVKIVEDSLRELERTLRDIERKV

SEQ ID NO: 25420 - protein, 55 aa, Artificial Sequence
  Synthetic
EDLRETEKDLRRLSEEHKRLLEELRDKARRLTERHEKALKEIEDELRKIKDEARR

SEQ ID NO: 25421 - protein, 59 aa, Artificial Sequence
  Synthetic
DEEEKIREDLERTLREYERELRRAKEELKETLKRYEEELREVKEDLDRTLEEVDDLLRR

SEQ ID NO: 25422 - protein, 60 aa, Artificial Sequence
  Synthetic
KKTLLRDLKEALKTLIKLIREILEDNLRVLRRIIELIETLLEDNRRVLEEIIKLIEEATT

SEQ ID NO: 25423 - protein, 59 aa, Artificial Sequence
  Synthetic
STKEEVERIVEELRRAHEKSLRDVKKILDDLAKIHDDSLEDARRIIEKLDRILEEIKDR

SEQ ID NO: 25424 - protein, 56 aa, Artificial Sequence
  Synthetic
DKLLEDVKEEIRKVKERIEDLLRRSRELLERLRKRLDDLLADSERKIDEVTKRTRK

SEQ ID NO: 25425 - protein, 58 aa, Artificial Sequence
  Synthetic
DELEKVERLLEEIEKIIEDLIRRVEELVRRILEFNKTTLKRNEELVRELEKLVEETTG

SEQ ID NO: 25426 - protein, 59 aa, Artificial Sequence
  Synthetic
KEVVRKLEEDLRRVRERSKKLVREHEKFLEDLEETIKEEKRRVDEELKRIKEEIKETRR

SEQ ID NO: 25427 - protein, 56 aa, Artificial Sequence
  Synthetic
SEKERLMRLLDKLKDLNRRLVERIKELLDKALELHKKLVKELRELLERLKELVERA

SEQ ID NO: 25428 - protein, 59 aa, Artificial Sequence
  Synthetic
EETVRRLREALKKLEDDLRKIERDAEREYKKLKDELEELTERYRREIRKLKEELKKDRK

SEQ ID NO: 25429 - protein, 56 aa, Artificial Sequence
  Synthetic
SKREELKELLERLLKLDRDTLEELKRLLDELKKTNDDTLEILKRLLEEVLRVIRET

SEQ ID NO: 25430 - protein, 59 aa, Artificial Sequence
  Synthetic
KDRVREIERRLEELRKRLEKVERDLRDRHRKVKKKLDDVIEKVKRRHDELRKELEDAER

SEQ ID NO: 25431 - protein, 59 aa, Artificial Sequence
  Synthetic
KDEEEVEKEIRRLLEKVKDVLRRSLEELERLLREIKEVLEKLEREDEENIERIKRELER

SEQ ID NO: 25432 - protein, 60 aa, Artificial Sequence
  Synthetic
RETLIREIEKILRRLNELNRRLLREVERILERLLELHKRLLDELLRIAERLMRLVEEVKK

SEQ ID NO: 25433 - protein, 56 aa, Artificial Sequence
  Synthetic
SEAEDLEELIKELAELLKDVIRKLEKINRRLVKILEDIIRRLKEISKEAEEELRKD

SEQ ID NO: 25434 - protein, 59 aa, Artificial Sequence
  Synthetic
KDEAERRRRELKDKLDRLREEHEEVKRRLEEELTRLRETHKKIEKELREALKRVRDRST

SEQ ID NO: 25435 - protein, 57 aa, Artificial Sequence
  Synthetic
DEVEKLKKLLKELEELNREVVDTVKKLLDELVKLNRDVLREVRELLKKLIDALEKTG

SEQ ID NO: 25436 - protein, 59 aa, Artificial Sequence
  Synthetic
EELRRELKKLEEEIERALERIRRRSEETADRIRRTLEKLREKSERKRREIEDTLRKDRK

SEQ ID NO: 25437 - protein, 59 aa, Artificial Sequence
  Synthetic
SLLEKVKKVIERLLEIHKKLLEELKRLIEKVLRITRENLEEVKRLIKRAVEILRRIAEE

SEQ ID NO: 25438 - protein, 60 aa, Artificial Sequence
  Synthetic
EEEVTRKIEELRKKLTKLIRELEETLKEVKKRNEDALRRLEKESKDLAERVRRLIEELEK

SEQ ID NO: 25439 - protein, 60 aa, Artificial Sequence
  Synthetic
SDKEEIKRRVEKTARDLETEHDKIKKRLEDTVRDIKRELDELLEKYERVLRKIEKTLREG

SEQ ID NO: 25440 - protein, 60 aa, Artificial Sequence
  Synthetic
EKRLIEEVVRLLRENLDVVRRILEALAKLIKELLEALEEVLRRNKELIRELLRVLDEALK

SEQ ID NO: 25441 - protein, 60 aa, Artificial Sequence
  Synthetic
DEEERVKKLLTDLRRLLRKLHEESKKLLDELRKKLRELRRRSEEKLREVERRLREAEKKL

SEQ ID NO: 25442 - protein, 59 aa, Artificial Sequence
  Synthetic
EELLRVLEELVRTLKKLLDENLKMVERLIRELEKVLDDHERKVRRLIEELLEVLDRDAK

SEQ ID NO: 25443 - protein, 60 aa, Artificial Sequence
  Synthetic
DEDRIIEEIARLLEELLRELLELIKKLIETNRRLNEEHERAVRELARLLEELLDRLVKKV

SEQ ID NO: 25444 - protein, 59 aa, Artificial Sequence
  Synthetic
EKIKKEIERELEELRRMIKRLHEDLERKLKESEDELREIERRLEEKIRRLEEKLERKRR

SEQ ID NO: 25445 - protein, 59 aa, Artificial Sequence
  Synthetic
STEEKLRELVKRLEELLRDLERLLRELEKSNRDLNETALRLVEESDKLLEELLEKLARN

SEQ ID NO: 25446 - protein, 59 aa, Artificial Sequence
  Synthetic
KDTVKRLKEDLDKARKDHEKKLEDLERLLKRNEERLRKMKKELEDKVERLRRELEKKRK

SEQ ID NO: 25447 - protein, 59 aa, Artificial Sequence
  Synthetic
DEEEKIRTTLDLLRKLLKVLREILEELIRSNKELNERLLRLVEDSDRLLEELLKKLEDD

SEQ ID NO: 25448 - protein, 59 aa, Artificial Sequence
  Synthetic
EEKVRDTEKKLRDLREKHKEIAKELERLLRENRRRLEELKREAKKVLDELRKRLEDERR

SEQ ID NO: 25449 - protein, 59 aa, Artificial Sequence
  Synthetic
SEKEEVEKRLKDLEEESERLLKEVRDTLKRLEEESKKLIDELRRKLEELRKEVKELVDR

SEQ ID NO: 25450 - protein, 56 aa, Artificial Sequence
  Synthetic
DKALTKVVDDVLRVLERVIERLLRLNKESLKELERILEDLRRLNKKTLDVLREVTR

SEQ ID NO: 25451 - protein, 59 aa, Artificial Sequence
  Synthetic
KEKEEVEKKLKEAEEEHRRLNREVEEDLKRAKRESERLLEEMEKKLDELEERVERLLRE

SEQ ID NO: 25452 - protein, 56 aa, Artificial Sequence
  Synthetic
REVLEKLVRDALRTLREVLDRLRRLNEELLEVLRRVLRELERLTRELLKVLRDALK

SEQ ID NO: 25453 - protein, 60 aa, Artificial Sequence
  Synthetic
SEAEEVARRIKELVRELEKLLRDSEETIKRLIDKNRDLLRRIAETIDKLIKDLRDLLRRI

SEQ ID NO: 25454 - protein, 60 aa, Artificial Sequence
  Synthetic
DEDVRRALERVEKLLREILERLKRHSEELAELARRLLDENRRIIEEIIKLIEDILRELKR

SEQ ID NO: 25455 - protein, 61 aa, Artificial Sequence
  Synthetic
DLERLVEELARLLKEALDTLARHSERLIKLAREILETLRRHSERIAELIERILRELMERRG

SEQ ID NO: 25456 - protein, 59 aa, Artificial Sequence
  Synthetic
EELKKKLEDISREIKKSLEEVEERLRRISDDVRRSLEELKRILDEIEREIERRLREAKR

SEQ ID NO: 25457 - protein, 60 aa, Artificial Sequence
  Synthetic
SDEERLRKEIRDRVEELRKRLDDTEEEYDKRIRDLRRKIKEVEDRYREKIKRLEEKLRRG

SEQ ID NO: 25458 - protein, 60 aa, Artificial Sequence
  Synthetic
KDTVLRILKELMDRDEEILRRILKLIKELLDESKKTVRRVLELLKELLRKILKLVEEITR

SEQ ID NO: 25459 - protein, 56 aa, Artificial Sequence
  Synthetic
SKKEILKEVLRRILKLIRELIETIKKVLKRSLDLNKELIDINKEALDRILKLLTDI

SEQ ID NO: 25460 - protein, 59 aa, Artificial Sequence
  Synthetic
KRRLKKLADELKEILDRLREKNKEIADRAKELHDEVRERLKEIAKRLKDVLRDARERVR

SEQ ID NO: 25461 - protein, 60 aa, Artificial Sequence
  Synthetic
REMEEVLKRNLDAARRVLETLKRILDRLKELNERSLRSLRDILRELLDIAREVLDLRRAG

SEQ ID NO: 25462 - protein, 56 aa, Artificial Sequence
  Synthetic
IEKVRKDVEDLAKELEDRLRDVERESRRLLEELRETLERALRRVKELHDELREAIK

SEQ ID NO: 25463 - protein, 56 aa, Artificial Sequence
  Synthetic
SRKEELLRILRRILEIAEEIIRDLKKWLDDDRELVREILELIKRLNEDNNRLIREA

SEQ ID NO: 25464 - protein, 58 aa, Artificial Sequence
  Synthetic
DELRRLEEALKESKRLVEEVLKRIEDVLRESKKLADEIRKKIEDLVRELEEELERVAR

SEQ ID NO: 25465 - protein, 60 aa, Artificial Sequence
  Synthetic
SKEEKKKELEKKAREIKRRLEENKREYKEKVDRLKEELRRLLEEIREKVKRLEERIRRAI

SEQ ID NO: 25466 - protein, 56 aa, Artificial Sequence
  Synthetic
KDLVKELEDVLKELLDLLREILKTVKRVNEDSVRSAEKLIEDLERMIRELLKEARK

SEQ ID NO: 25467 - protein, 56 aa, Artificial Sequence
  Synthetic
DERERIEEDLKRLRDTLDTKEEESRRRIRELEEDLKRKIEESRRRIEKLKRRMEED

SEQ ID NO: 25468 - protein, 55 aa, Artificial Sequence
  Synthetic
EILDRLRKVLEELARRDRKILEDLERAVRELDKLDRDILRTLLRVAEELLRRREK

SEQ ID NO: 25469 - protein, 61 aa, Artificial Sequence
  Synthetic
DKLEEILKLLKEVIKTLLRLSEDLNRLNRELVRTVLELLKRVVELLKRVLEEVRKKVRDAN

SEQ ID NO: 25470 - protein, 59 aa, Artificial Sequence
  Synthetic
DKVERDVRRIKEKIKRILDDLRRRVEELKKKNKEDLEKYDEDIRRLEEEIKRLLEEARR

SEQ ID NO: 25471 - protein, 56 aa, Artificial Sequence
  Synthetic
REEKELLDEIRKRVKESEDRLEKLLRDYEKELRRLEKELRDLKRRIEEKLEELRRR

SEQ ID NO: 25472 - protein, 56 aa, Artificial Sequence
  Synthetic
KDALSRLLEELLRVVDDLIRVLKELIDKSRKVIEELLELLKRINEENLKVLAEIIK

SEQ ID NO: 25473 - protein, 59 aa, Artificial Sequence
  Synthetic
SRKEKLLKESEEEVRRLRRTLEELLRKYREVLERLRKELREIEERVRDVVRRLKEVLDR

SEQ ID NO: 25474 - protein, 56 aa, Artificial Sequence
  Synthetic
ERLVKTLIEDVERVIKRILELITRVAEDNERVLERIIRELTDNLERHLKIVREIVK

SEQ ID NO: 25475 - protein, 61 aa, Artificial Sequence
  Synthetic
SEKEKLREIIKRHLRSVEEVLRLLAKILKDLTDASEENLRLLKELLRRLLEVIRKLVEDVK

SEQ ID NO: 25476 - protein, 56 aa, Artificial Sequence
  Synthetic
EDALRKLKKKLEEIEKTVKDSIDKLRELLEELERRVRKIAEENKRLLEELVREVKK

SEQ ID NO: 25477 - protein, 60 aa, Artificial Sequence
  Synthetic
KDEERLEDELRELTERMREKLKEHEERVRELSKEVKRKAEDSEEKLKKDLKEVEDTLRKK

SEQ ID NO: 25478 - protein, 55 aa, Artificial Sequence
  Synthetic
EELLERIERIIRTSKKLLTEALEIIREIIKRSKDSNRDLHRDLEAILRRIEEAKK

SEQ ID NO: 25479 - protein, 61 aa, Artificial Sequence
  Synthetic
SDEERLVAELERLIEISLRILEELLEVLRRLVEESLRLLEELVKVAEEIIERLLRLLEETV

SEQ ID NO: 25480 - protein, 55 aa, Artificial Sequence
  Synthetic
ERLKKTADEIKKRLDKVRKDSDDLAEEIKRILKRVEDESRDTARKVKKVLEDAKR

SEQ ID NO: 25481 - protein, 59 aa, Artificial Sequence
  Synthetic
SKEDEVLERLKRAIERSIKIVEEIVKRNVETNERSERILRELAETLRRVLDTIRKLLED

SEQ ID NO: 25482 - protein, 56 aa, Artificial Sequence
  Synthetic
EEELKRRLEEIERKLKEVLDRLKKKHDDDNKENKDVLDEVRKRHKELLDKLREKRK

SEQ ID NO: 25483 - protein, 57 aa, Artificial Sequence
  Synthetic
DEEEKVLRILEELLKEHKRVLEELLELVRRIIERHKEVLKRVLKLVEDLIRRIKEAN

SEQ ID NO: 25484 - protein, 56 aa, Artificial Sequence
  Synthetic
EEAAKEVEKRLEEVKTDLRRLARESEETLRRVEERLEELKERSERELKRVEEEIRR

SEQ ID NO: 25485 - protein, 56 aa, Artificial Sequence
  Synthetic
SEEEELKRILDENHESLKDLLREIKEILRANHETVKKLLETIKEILDTVLKILRDV

SEQ ID NO: 25486 - protein, 55 aa, Artificial Sequence
  Synthetic
EELLETLKRLIRELVKRLEKILDDDRKLIDRLVRRLEEILKEDKRRIEEALERLR

SEQ ID NO: 25487 - protein, 60 aa, Artificial Sequence
  Synthetic
SELERAEELIKKLLKLHEDVLRRLTEVDDELLEIHDRVLKRLKEVDDELLKLIRDMLRRA

SEQ ID NO: 25488 - protein, 58 aa, Artificial Sequence
  Synthetic
EEAKDIREKLERLLRKSEELVRKSLKELKELLDKSKKLLEDSKRRLEEILKEIKDDSR

SEQ ID NO: 25489 - protein, 60 aa, Artificial Sequence
  Synthetic
DEEDEVEKLIREAIELNKRILEEIKELIERIVRRNKEILREAKEAIERLIKIARDLTKDK

SEQ ID NO: 25490 - protein, 56 aa, Artificial Sequence
  Synthetic
EEKLERIARELKKLLEEVERRSRKAIEDLKRELKRVMDRSREAERKLRELLKETKR

SEQ ID NO: 25491 - protein, 58 aa, Artificial Sequence
  Synthetic
SEDEVLKKIEDELREVEKKLEDVLREIKRRHDELKKRLDEKLERLRRRHEELKEALDR

SEQ ID NO: 25492 - protein, 60 aa, Artificial Sequence
  Synthetic
EEEVKRDLKRILDRLLEVNTKSIEDLKRILDKLLEVNRRNVDEIRRILDELRKVIERVTK

SEQ ID NO: 25493 - protein, 60 aa, Artificial Sequence
  Synthetic
DETERVKEVLDRSLKLNEDLLRKIDEILKRLFEINKEVIDIIRELLERLVRIAREVLEKN

SEQ ID NO: 25494 - protein, 55 aa, Artificial Sequence
  Synthetic
EEVEKRIKKLLDDLEKVAREIRKKHKELLEELEKVAREVMDAHRRLLEDLKRTDD

SEQ ID NO: 25495 - protein, 59 aa, Artificial Sequence
  Synthetic
SLKEIVKEIIDRASELLKRLLERSEDSLRTASELLRKILEDSRRSLRTIARLLEELLRT

SEQ ID NO: 25496 - protein, 55 aa, Artificial Sequence
  Synthetic
REIEKEIRRILEELKRKHDEIEKKIRELEREIKRKHEELEDRIRKIERDLDRRTK

SEQ ID NO: 25497 - protein, 58 aa, Artificial Sequence
  Synthetic
SLRELVEKILRDAAKLIERLLKLSEEVLKRIEELLEELLRLSERSLRELLRLLEELLR

SEQ ID NO: 25498 - protein, 55 aa, Artificial Sequence
  Synthetic
KDIKKELDDIVRDVKRKHDKLREELKKIVEDAERAHRDIDRKIREILKELKERTD

SEQ ID NO: 25499 - protein, 57 aa, Artificial Sequence
  Synthetic
REEELRKKIEDELRDLKRKLEDLLRRYEEKLREAEKKLKDLLRRYEERVREIKKELS

SEQ ID NO: 25500 - protein, 60 aa, Artificial Sequence
  Synthetic
EDELLRVLEKVIEDNLRIVEELIRRLEEVLKRHEDLVRTLLDLLKRVLEAVKKLLDEAVT

SEQ ID NO: 25501 - protein, 60 aa, Artificial Sequence
  Synthetic
SSEELLKRIVDEDERVLEEWRRVLEEIKDLSKRVVDLLDKVLKEIEKIVDEVTRRLERDG

SEQ ID NO: 25502 - protein, 55 aa, Artificial Sequence
  Synthetic
KDLLETIKKRVEEIRRTLEKIKRDYDKAIEEIRRKLERKLEEYKEVIDDLRRKTK

SEQ ID NO: 25503 - protein, 59 aa, Artificial Sequence
  Synthetic
SSDELLEEIIKEIARLIEELLEILRENLERSEESLRRVLRAIDDNLRRVERLIEALARG

SEQ ID NO: 25504 - protein, 56 aa, Artificial Sequence
  Synthetic
KKAMDEELEKIRRDHERLKKEIEDRLRELKDKHRRAFEELKKMLDDIKRKVDEAKR

SEQ ID NO: 25505 - protein, 59 aa, Artificial Sequence
  Synthetic
DEEEILREILRVAEELSRLNEEVNKRVLEVLERLSRMNEKLLKEVKDVVDRLIELRRRK

SEQ ID NO: 25506 - protein, 60 aa, Artificial Sequence
  Synthetic
DKEVKRRIEKALRDIEELIERILRRNEEVKREIERLDEENRRRNKEALERIRRLIEETKR

SEQ ID NO: 25507 - protein, 59 aa, Artificial Sequence
  Synthetic
KDEEELKRRVEKVIRDLERKLKDLEEDHRRVLEELKRELEETKRRLDKVIEEIERVLRR

SEQ ID NO: 25508 - protein, 60 aa, Artificial Sequence
  Synthetic
KERLIRVLEEILRLVLRLHEEVVRLVRRLLEESHRILRKIVELLREILEDLKKILDDIRR

SEQ ID NO: 25509 - protein, 56 aa, Artificial Sequence
  Synthetic
DEEDEIRKRLKELLDDVKRRLDELRRESERLLKEVDDLLRESKKRLEDEKKKLEER

SEQ ID NO: 25510 - protein, 55 aa, Artificial Sequence
  Synthetic
KEVLERLEKIVRRNEEVNDEVRELVTRLNETSNRAARELLELAKRIIEEIKKAVK

SEQ ID NO: 25511 - protein, 57 aa, Artificial Sequence
  Synthetic
SKLETIKELLERLHELNERAVRELKKTLEDLHRDNARLIEELIRKNERLLEALREKV

SEQ ID NO: 25512 - protein, 55 aa, Artificial Sequence
  Synthetic
EDADRDVKRLKEESEELLRRSKKRADDLKREVERLLEESRRRLDELLKELKDRSK

SEQ ID NO: 25513 - protein, 61 aa, Artificial Sequence
  Synthetic
SRLEEIKKLLEKVMELIRRIAEELLRINEKVLEVLERIVRTILRLNEEHLKDVRDIARKLK

SEQ ID NO: 25514 - protein, 55 aa, Artificial Sequence
  Synthetic
TEIRKRLKELRDKNEELKKKVEEMIRRLEEESKKTKKRVEEILKRIEEEVREKAR

SEQ ID NO: 25515 - protein, 57 aa, Artificial Sequence
  Synthetic
SREETLRERIERIKRKSEEDVERIKRTLDREREENEETVRRIKETVDRLREEVEREL

SEQ ID NO: 25516 - protein, 58 aa, Artificial Sequence
  Synthetic
RELDRVEEIIRRIVKKLEEILRDLKRRAEDHIRRLTELIERSLKIVRDLAEDIRRAIE

SEQ ID NO: 25517 - protein, 59 aa, Artificial Sequence
  Synthetic
DADELLRRLAEEVERVIREAEDLLRRWKETIKKVLDDLKRLLDELKKRNEDVIRELTKT

SEQ ID NO: 25518 - protein, 56 aa, Artificial Sequence
  Synthetic
KDDLEDILRKNLDRLRKLLERLREILRENLEALKKTLKRLEDVVREILEDLKRERK

SEQ ID NO: 25519 - protein, 59 aa, Artificial Sequence
  Synthetic
TEKELLEELEEDVKRVIEELERLLREWKEELRRVLEESERLLRELRERNKRELEDIRRI

SEQ ID NO: 25520 - protein, 56 aa, Artificial Sequence
  Synthetic
LEEVTRILERNLKELERNLRDLDRTVKTNERLLRELLKKLRDIVRTILELLERKTK

SEQ ID NO: 25521 - protein, 57 aa, Artificial Sequence
  Synthetic
SEKEDVRRKLEEDREKHERDLRRIEEELRRTIEESERRLKEVKKRLKELIDDVRRRD

SEQ ID NO: 25522 - protein, 60 aa, Artificial Sequence
  Synthetic
KEELKKAVETILEELVRIADKLIDIHREILEKLLRVAEKLLEVSRRALDKLKKLIDKTDK

SEQ ID NO: 25523 - protein, 56 aa, Artificial Sequence
  Synthetic
DKAEVLREALKLLKDLLEELIKIHEESLKRILDLIDTLVKVHEDALRKLKELLERS

SEQ ID NO: 25524 - protein, 55 aa, Artificial Sequence
  Synthetic
EEIDRELKRVVEELRRLHEEIKERLDDVARRSEEELRRIIKKLKEVVKEIRKKLK

SEQ ID NO: 25525 - protein, 59 aa, Artificial Sequence
  Synthetic
REKEEIERTLEELKRILDELVKDDKKSLDRLREIMERSVRIAEETLRKLRETLELKARG

SEQ ID NO: 25526 - protein, 56 aa, Artificial Sequence
  Synthetic
KDEVLKRLDDLIKEWRDVLEKLLRDLRELLERSKKRLRKVREDLKRLLEELERRAD

SEQ ID NO: 25527 - protein, 56 aa, Artificial Sequence
  Synthetic
STREKAKKVLDTLRRDNEDMKRVVEKILRALKRTNERAEKLAREITEEIKRILKEV

SEQ ID NO: 25528 - protein, 56 aa, Artificial Sequence
  Synthetic
EDLLRKLEEELRRIKEKLRKALEELEREHRELEKELDKLHDESRKEHERIEEELRR

SEQ ID NO: 25529 - protein, 60 aa, Artificial Sequence
  Synthetic
DKERVLEDVKRRAKELEELLKEVEDRYEEDLRRIEETLKDTERRYREKLEKIKEELKRTV

SEQ ID NO: 25530 - protein, 59 aa, Artificial Sequence
  Synthetic
EKIKRIVEKIIKEHRDVLERLKRIIEEITRSDRESLERLKEILKELIRILKELADRERK

SEQ ID NO: 25531 - protein, 60 aa, Artificial Sequence
  Synthetic
KSEDVVRELIKLHRELNDKARKVIETILERNRELVETAERVIRRLIKLLEDALRILKKSS

SEQ ID NO: 25532 - protein, 56 aa, Artificial Sequence
  Synthetic
EEELRRLEEEIRDIVRRLRKRVEEYRKELEDLEKELADEVKKYEDEVKRIREELRK

SEQ ID NO: 25533 - protein, 60 aa, Artificial Sequence
  Synthetic
STEELLREIEEIIRRILEIADKTSKEWADLIKRILELIKRNLEELRKLVREVLEEVRKEG

SEQ ID NO: 25534 - protein, 56 aa, Artificial Sequence
  Synthetic
KDTIDKLRKRLKEIKDRTKELLDRIREEIRELRERNKEIVKDIERRLRELKDRIRK

SEQ ID NO: 25535 - protein, 57 aa, Artificial Sequence
  Synthetic
SKKELVREVVKELHELNKDVLRVLTEIVERVKELDKRVLEVLRRIVEEVERLAKEAG

SEQ ID NO: 25536 - protein, 59 aa, Artificial Sequence
  Synthetic
KDRLREIEERVRKILEEIDKLLDDLRKAYDRILERIERLVRELSRKHKEVADKITELVK

SEQ ID NO: 25537 - protein, 60 aa, Artificial Sequence
  Synthetic
SEDERVTRLKEELERLLDELRKRYEKLREEIRRVLEDLKKKYDELKEELDKMLRDLERRG

SEQ ID NO: 25538 - protein, 55 aa, Artificial Sequence
  Synthetic
EELLRELERVSREDERLVKEAADELRRILDTDRKLLKEVVDTLERVLRRILKETR

SEQ ID NO: 25539 - protein, 61 aa, Artificial Sequence
  Synthetic
SEEERVEELLRRIEKLLKESEEDVERLKKRHEEENRRLKEEVKRLMDELREILRRLEEETG

SEQ ID NO: 25540 - protein, 58 aa, Artificial Sequence
  Synthetic
KDVDKLVEVLDRVLRRVRELLEELAETNRESIRRYERLSEKNAELVTEIIERLRRTVK

SEQ ID NO: 25541 - protein, 56 aa, Artificial Sequence
  Synthetic
SKMEKLLKDLREALEKVKRRYEELERRLDEVLKEHEEIVKRLLEELEKVLKRIEEG

SEQ ID NO: 25542 - protein, 59 aa, Artificial Sequence
  Synthetic
ERVEELIERLIRIIERLLREVIKSHEKLVRTIERLIEESIRVNEELLEVIERLLDRARK

SEQ ID NO: 25543 - protein, 57 aa, Artificial Sequence
  Synthetic
DLERVVEDIVDKAKRLLDKNLEVLKRIVDEVLRLLERLLRESRKVVKRVKEIIEELV

SEQ ID NO: 25544 - protein, 59 aa, Artificial Sequence
  Synthetic
KDLLTELEKKLRKLKRDSEKVVDDLKKELERIKREVKRLIEENRRTLKDIKRAVDEARK

SEQ ID NO: 25545 - protein, 57 aa, Artificial Sequence
  Synthetic
DEDELVEEIERRLREIEKRLRDVMEESKRRLEEILRELKRIIDESRKRLDDLRRRLK

SEQ ID NO: 25546 - protein, 59 aa, Artificial Sequence
  Synthetic
ERIEKILEEILRLSRESLRKLKKILEELLKVSEDSLRDLIRILEDLLRLLKDLLEKLKK

SEQ ID NO: 25547 - protein, 59 aa, Artificial Sequence
  Synthetic
SEDEELEDLKRKLRRALERYEDRLREIKRRLDEKLKEIKRDYDRLKKELDDLLREIERR

SEQ ID NO: 25548 - protein, 55 aa, Artificial Sequence
  Synthetic
EVVKELLDLVREIIKRLKEIHEEILRLIETVLEDLERANRRLLDLARKILEDARK

SEQ ID NO: 25549 - protein, 60 aa, Artificial Sequence
  Synthetic
SKEEKLEDLIRRIKERLEEALRRNKKTADEIRKELKKATDRNRKRAKELRERLREVLRRT

SEQ ID NO: 25550 - protein, 55 aa, Artificial Sequence
  Synthetic
EVVEELLRLLEELLEHNREVIEKLVDLIRELLRHDKEVTEEILRLIEELLKEVEK

SEQ ID NO: 25551 - protein, 56 aa, Artificial Sequence
  Synthetic
SERELIERWLELHKEILRLIRELVERLLKLHREILDTIKKLIRELLELLEDIARKL

SEQ ID NO: 25552 - protein, 59 aa, Artificial Sequence
  Synthetic
DDERRTLTELLKRMEDILEKVERTLKKLLDDSKRMAEEVKKTLKELLERSEKVAEDVRK

SEQ ID NO: 25553 - protein, 60 aa, Artificial Sequence
  Synthetic
SEDELIRRIREELKRLEKEHEDMVRELEKKHKKLKEELDRAIEEIERRLRELKERVEREG

SEQ ID NO: 25554 - protein, 55 aa, Artificial Sequence
  Synthetic
DELVKEIKRLLEELLRLLERLVRSSRRLNEELLRLSEKLIRDAERLARELLEAAR

SEQ ID NO: 25555 - protein, 56 aa, Artificial Sequence
  Synthetic
KKEEDLRREVEEVKEEIRELIERSRESVRRILKEIKDLIRKSKESIDKILEDLKRK

SEQ ID NO: 25556 - protein, 59 aa, Artificial Sequence
  Synthetic
EEVLRVVEELLKLLKEHLEENVRILRRILELLRRHHDTNRKIVKRILELLRRVLESIRK

SEQ ID NO: 25557 - protein, 60 aa, Artificial Sequence
  Synthetic
SVEEILRELLRVLEEILKRIADINEKLLRVSRKIVEDLKRLLDEALRVLRRAVEEIEKEG

SEQ ID NO: 25558 - protein, 58 aa, Artificial Sequence
  Synthetic
ERLREILEELERVLEKVMRDLRRILREYEEVLKEAREEYRKILEELRKVLKEVDDRLR

SEQ ID NO: 25559 - protein, 57 aa, Artificial Sequence
  Synthetic
SELEKIDRLLEKVLRENKRALDELVRLLEELIKTNRDALEKLREINERNIERLREEV

SEQ ID NO: 25560 - protein, 59 aa, Artificial Sequence
  Synthetic
KKVLEDLERHLEESKKTVERLVRELRKTHRKVEEDVKRLIEELRRLHEELRKRLEDDDR

SEQ ID NO: 25561 - protein, 56 aa, Artificial Sequence
  Synthetic
REKEELIKLIRDILEKLREHSRTIVELLETILRVVREHSKRIEKLLRELLDILRRQ

SEQ ID NO: 25562 - protein, 60 aa, Artificial Sequence
  Synthetic
EKEVEDLLRKAVEDIEKLIRENEKLLEDVLRTIRKLIRENEELLRDIVEKIKRLADEARK

SEQ ID NO: 25563 - protein, 59 aa, Artificial Sequence
  Synthetic
SEEEEVKKVVDEIKKVLDELRKANEDSARRLREVLEELRKRNEESKKEVKDLLEELKRV

SEQ ID NO: 25564 - protein, 60 aa, Artificial Sequence
  Synthetic
TDTKVKELIEIVDELLEIDDRILEEIERTVRKVIDLNRKVLEDIEELVKEAIKVLEEIAK

SEQ ID NO: 25565 - protein, 59 aa, Artificial Sequence
  Synthetic
DEEEELRELKERIERTIEKLKEDTKKLKKELEDRIRELKRKTKELLDDMKRLIKEVKDK

SEQ ID NO: 25566 - protein, 55 aa, Artificial Sequence
  Synthetic
EDIIRLVRDLIRLNREHLRDLEEAVREIIKLLREHLERLERVVDRMIRELRKAAK

SEQ ID NO: 25567 - protein, 57 aa, Artificial Sequence
  Synthetic
SEEEELDKLRRELEELAKESTREVKELLRELREMLERHKKRLKEIKDKLDEDIKRED

SEQ ID NO: 25568 - protein, 58 aa, Artificial Sequence
  Synthetic
DELERLKDLLRTLIKKLEDLLENLRRLVERVIESLRRLVEKDEEINKRTIKELRRAIE

SEQ ID NO: 25569 - protein, 60 aa, Artificial Sequence
  Synthetic
DEERIVDKILKVIRESAEALRKIVEDVLRVLEELMRRHKKNVEELDTIVEDLLRKVRERV

SEQ ID NO: 25570 - protein, 56 aa, Artificial Sequence
  Synthetic
EEVLREARRRIREVERHNKKVHDDARKRLRDLVEELKRLHRELEEKLRRIIEEIDR

SEQ ID NO: 25571 - protein, 61 aa, Artificial Sequence
  Synthetic
SEDEKVRKLLRDLAEEIKRLLETYDRKLKEIAKRIEDTLREYRERLEELKRRLEELVRKKN

SEQ ID NO: 25572 - protein, 59 aa, Artificial Sequence
  Synthetic
EELVREIRRTLETILRLNEELLKRIRDVLREIIELNREVIERLREILERLADLIRRRAE

SEQ ID NO: 25573 - protein, 60 aa, Artificial Sequence
  Synthetic
SELEKLARLLEEILELLRELHRKTAEALKEILELLDRHLDDLRRAVKEILEDLDKDLEDE

SEQ ID NO: 25574 - protein, 56 aa, Artificial Sequence
  Synthetic
DDKAKKVREKLEELLRRLKEKNDDLRRKLERLARELEKLHEEVKKRLKELEDEARR

SEQ ID NO: 25575 - protein, 60 aa, Artificial Sequence
  Synthetic
RELEKLAEVLERIVRALETHLKLIADVLREILRLLDEHLKIIKKVVRDILRELDEVLRRR

SEQ ID NO: 25576 - protein, 56 aa, Artificial Sequence
  Synthetic
SDTLEKLRRRLEDRRRKLKEANDRVREVLDRLRKELEEIDKRLEDVLKKLREDLER

SEQ ID NO: 25577 - protein, 60 aa, Artificial Sequence
  Synthetic
SKKELLEEVVRRAIELLKRHLEKLKRILEEIVRLLEEHLEKVERVLEAILRLLDDLLRRV

SEQ ID NO: 25578 - protein, 56 aa, Artificial Sequence
  Synthetic
KDKLKEIEDELRRLLEELRRLDKKIKDRLRELKKDLDEANRRIKETLKKLLREVEK

SEQ ID NO: 25579 - protein, 56 aa, Artificial Sequence
  Synthetic
SDLEELEKLIRRLLKINEDLIRIIEDLIRKSLTLLKRIVDLIRELIREIEEIIRRT

SEQ ID NO: 25580 - protein, 55 aa, Artificial Sequence
  Synthetic
EEIRKRVRDLEEKVKKLLRDLEEESRRVAEKVEEDLKRVEEESRRTAREVEEKER

SEQ ID NO: 25581 - protein, 60 aa, Artificial Sequence
  Synthetic
SKEERADELLKDLERKVDKLRREHEELLKELKRKVDELRKEHKKLLDTLREEVRRIEEKV

SEQ ID NO: 25582 - protein, 59 aa, Artificial Sequence
  Synthetic
EDVLREITRLLEKAKRIIEESLREITELVKEIEKIIKESLDAARRLLEEIKKILEELAR

SEQ ID NO: 25583 - protein, 59 aa, Artificial Sequence
  Synthetic
SIEELARKLVKENRRLATEANKILKDIVKTNRDSIRKVREILKELVERLRDLIRKVRRD

SEQ ID NO: 25584 - protein, 55 aa, Artificial Sequence
  Synthetic
EDLKRELERAKRELERLLRELDEEHERMKKKVKDEIRRLKKESEEVKKEVKDTED

SEQ ID NO: 25585 - protein, 59 aa, Artificial Sequence
  Synthetic
DEEEITRKLEETIRRLEEEIDKIIKDLLRMLEENNKEIKKVIEKVLETSRRILSALARN

SEQ ID NO: 25586 - protein, 56 aa, Artificial Sequence
  Synthetic
EEVLREAEKRIRDSAEEVKRILEEHKERLRELVKKLERVKETVRKKIEELREEAKR

SEQ ID NO: 25587 - protein, 56 aa, Artificial Sequence
  Synthetic
SELEKDLKDAEEIIKELEEINKRLLEEIRRIVERITKINRDLLETVKRLIEELIKE

SEQ ID NO: 25588 - protein, 56 aa, Artificial Sequence
  Synthetic
EERLKEIEERIRRTEEDVKRKHDDVRRELDEEDDRYKRELDKVRKKLKEKADRIRD

SEQ ID NO: 25589 - protein, 56 aa, Artificial Sequence
  Synthetic
SKLEDLLRKVEEIIKEIERINEELLKRVAEIVETLLRENKKLLEEIKEILKRLIED

SEQ ID NO: 25590 - protein, 56 aa, Artificial Sequence
  Synthetic
ERKLDKIRKDLERVVREYEEKLKEVRKRLRELVERVKEKHKRIEEELRKTAKEVRD

SEQ ID NO: 25591 - protein, 59 aa, Artificial Sequence
  Synthetic
SSKELVEKLKELIKDHLRVADEVIKKLEELIRRHLRKVEEIARRLEELIRELADELRRA

SEQ ID NO: 25592 - protein, 55 aa, Artificial Sequence
  Synthetic
RRLDRLEEKVEKDLRKLARELEDVNRRLEEELRRLEKRSEDLNRRIREEIKKDAK

SEQ ID NO: 25593 - protein, 61 aa, Artificial Sequence
  Synthetic
KDDEILRKLLEILERLLKLSEEVLRELLRLLEELLRLSKESLKRLSRLLEEALKTLVEEEG

SEQ ID NO: 25594 - protein, 59 aa, Artificial Sequence
  Synthetic
ERLKAVVDRIEKAIKKVTEDSRRLVKRIETELRELVKRSKDLAREVEKRLKEVVEEAKR

SEQ ID NO: 25595 - protein, 59 aa, Artificial Sequence
  Synthetic
SDLERILDKVTKLAEDAKKLAKKSVDLHRDNIRRLKTTLKRILESLRKAIKRLKDALRR

SEQ ID NO: 25596 - protein, 55 aa, Artificial Sequence
  Synthetic
EELEELKRDLDRLFEKIRTDLKRLRDTNRKLFDDLRKEHEAVEDKVRRVAEELTK

SEQ ID NO: 25597 - protein, 56 aa, Artificial Sequence
  Synthetic
SEEDLVREVLRAIKRILELLTTLSKENLEVVKRIIEDLERVARENLRVIEEIIKKI

SEQ ID NO: 25598 - protein, 56 aa, Artificial Sequence
  Synthetic
ERIIEEIRRTATEVLKRNEAVVKKIRELIKRVTERNRKVLEEIKELVKRIKDELRR

SEQ ID NO: 25599 - protein, 56 aa, Artificial Sequence
  Synthetic
DKEREIDDIAEKLRRKYKKLREDLDRIEEELRERYERLKRKLDELARRLTKKARDE

SEQ ID NO: 25600 - protein, 55 aa, Artificial Sequence
  Synthetic
ERLEELLKEVVETLRRLLEELKRLSEEVLKKAKEVIDRIRRLSEEVVKSLRDAAK

SEQ ID NO: 25601 - protein, 61 aa, Artificial Sequence
  Synthetic
SEEEELDKLLKEYERVVREIEEKLDRVKRDIERLVEEITRDLRRVLEEYRKVVEELAKDEG

SEQ ID NO: 25602 - protein, 58 aa, Artificial Sequence
  Synthetic
DTARRIERLSREVIKKLEKALKELEDLVREVLRRLKEAVEEIHKLSRDVIKMLTDATR

SEQ ID NO: 25603 - protein, 59 aa, Artificial Sequence
  Synthetic
DDEERLKKVKEEIEEKAKRLKEDLERALKRYEDIIKKLEDDNRKVLERIRRKVEELKKN

SEQ ID NO: 25604 - protein, 60 aa, Artificial Sequence
  Synthetic
DELIRKALEELLRIAEEILRRDLRLLEENRRVVKESLDVLAELLERLLELLERILREVRK

SEQ ID NO: 25605 - protein, 60 aa, Artificial Sequence
  Synthetic
SERDVLRELLERIKKLLETLIRIVEELVRRSEETIKRLAELNRRLIEEIRRIVEEVKKDV

SEQ ID NO: 25606 - protein, 55 aa, Artificial Sequence
  Synthetic
EEVKKRVEELRREYRETLKRLRDESEKIAEELKRLLDELRRRLEELARELRERTK

SEQ ID NO: 25607 - protein, 58 aa, Artificial Sequence
  Synthetic
TEEEIIKEIVKLLRDLARLHEEVDRTNKRLLDELVRLHREVDERLTRLAEDLIRLAEK

SEQ ID NO: 25608 - protein, 56 aa, Artificial Sequence
  Synthetic
RKDLRKVVEELRRRIEELNRRHDKLAEDLRREIEELNKEHKRMLRELEKKIEDDRR

SEQ ID NO: 25609 - protein, 57 aa, Artificial Sequence
  Synthetic
DAEEILKEIHEIDKRTIDEIRKILKKLLEADKKSIDDIRRILKKLLEIVKRLIDLLR

SEQ ID NO: 25610 - protein, 56 aa, Artificial Sequence
  Synthetic
DKTLKKILDELRRKVKETDDRLRKLHEDLKRKVKELIDRLERLNEDIARLLKETRD

SEQ ID NO: 25611 - protein, 57 aa, Artificial Sequence
  Synthetic
KTEELLRELIKVLKETLDRLKRVLEKLAETNDKSLKELLKLLEELLKAIRDVLRRIL

SEQ ID NO: 25612 - protein, 55 aa, Artificial Sequence
  Synthetic
DEVVEELEKVARELADKLRRVLKESEDVVKRVKDELREVLDRSKKVLEELKKKRK

SEQ ID NO: 25613 - protein, 58 aa, Artificial Sequence
  Synthetic
SKEELVKEIDELNKRVNDLLEELLRKSEKLHKEILELLERLLREIIKLLRRILEIVER

SEQ ID NO: 25614 - protein, 56 aa, Artificial Sequence
  Synthetic
EDELRRLLEDIERKIERLLRELKKESEEIRKRIRELLEDNRDKSRKIKKAIEELKK

SEQ ID NO: 25615 - protein, 56 aa, Artificial Sequence
  Synthetic
KLEDAARIAAKAAEEWAEAHKRAAKINAEASEEWAKAHREAAKIAAEAAKRAADEA

SEQ ID NO: 25616 - protein, 55 aa, Artificial Sequence
  Synthetic
EDALRVIEKAAEDAERAAKESLDVAERALRESEKAAKESLEVLERALRDAKRAAD

SEQ ID NO: 25617 - protein, 55 aa, Artificial Sequence
  Synthetic
SALETAAKLAKEAADRWLEASKRAAELAKDAADKWLDASRRAAELAKKAAKEALD

SEQ ID NO: 25618 - protein, 60 aa, Artificial Sequence
  Synthetic
DTDLKRRAAKAAEDIKKAADELLKKSEDAAREIKEAADKLLEDSKRAAEEIKRAADEITR

SEQ ID NO: 25619 - protein, 57 aa, Artificial Sequence
  Synthetic
DEAEKLAKEAREAIKRYADASEKIAKEAREAIKKYLEASKRIAKELREALKELARRL

SEQ ID NO: 25620 - protein, 56 aa, Artificial Sequence
  Synthetic
KDAVREADEAAERAREKLERLSREAKKAAKDAKDKLKRLSDEAKKVARRLIEELKR

SEQ ID NO: 25621 - protein, 58 aa, Artificial Sequence
  Synthetic
SKDEKAIEALKRAADETRKAAEKSADAARRAAEKSEKAAREAAEALKRAVEEAARALG

SEQ ID NO: 25622 - protein, 55 aa, Artificial Sequence
  Synthetic
EAVLRAAEKAIKAAEEAARANKKAADEAIRANEEAAEANKRAADKAIKAIRDAAR

SEQ ID NO: 25623 - protein, 58 aa, Artificial Sequence
  Synthetic
DREDAARRVEKAAREIAEKNKKAARDIKELAKEAIKRTKEAAERVKRAAKRIAEAAEE

SEQ ID NO: 25624 - protein, 56 aa, Artificial Sequence
  Synthetic
KDAVKRALEELARAAEEAARADAEAAKKLAEAAERAARANIKALRDLAKAAKDAAR

SEQ ID NO: 25625 - protein, 60 aa, Artificial Sequence
  Synthetic
REEEAAREAAEAARRAAEIAIKANEEAARAAKRAAEISIKASEDAARAAEEAAKEAARSN

SEQ ID NO: 25626 - protein, 59 aa, Artificial Sequence
  Synthetic
EDALRRAKKAIEDAIKVLKEALDKSAKAIEEAIRVAKEANERSAKAIKDAIEVAERAAR

SEQ ID NO: 25627 - protein, 59 aa, Artificial Sequence
  Synthetic
SEAETLVERLKRLSERDERAARRLVEELKRLAEEDKRAAEELARRLEELARRAEDVARA

SEQ ID NO: 25628 - protein, 116 aa, Artificial Sequence
  Synthetic
EEAARAIKLAREAAKRAIDASKESADAAERAAKEAIKASKRSAELAEEAAREAIKALKDAAEEAAKRLRRAAEEALKINKRANEELERAAREALDLNRRANEDLEKAAEDALRTAK

SEQ ID NO: 25629 - protein, 59 aa, Artificial Sequence
  Synthetic
REAEELVKRLKELAEKDRRAAKRLVEEAEKIIRRARELSKKTVKKLEDLIERAKRLADA

SEQ ID NO: 25630 - protein, 56 aa, Artificial Sequence
  Synthetic
AEDAARRAEEAARRALKINEDAAREAERAAREALKINDEANKRLEEAARRALETAR

SEQ ID NO: 25631 - protein, 60 aa, Artificial Sequence
  Synthetic
KELEEILKTVEDLVRRAKELLRRIHEINRESIEDIRRLLKEIHDTNKRSIEKVDELLKRK

SEQ ID NO: 25632 - protein, 56 aa, Artificial Sequence
  Synthetic
ETEIRKILKESNDRLTEVIKEVEKVLRESDELLRDALKKIVDVLREVLKRLEDTVR

SEQ ID NO: 25633 - protein, 59 aa, Artificial Sequence
  Synthetic
EKEKEIKDAEDEARKAAEESKRKIDKADEDAKKALEELERSIREADKDAKRALDEERRE

SEQ ID NO: 25634 - protein, 57 aa, Artificial Sequence
  Synthetic
REDAARIAAKAAKDALKANEEAARILARAAKEALKILEDATRILKEAADRALDILRK

SEQ ID NO: 25635 - protein, 60 aa, Artificial Sequence
  Synthetic
SEVEEIEKVARRNLELIKRLLEKAERVAKKSLDLIKKAADDARRIAEETLKLIREAAEAG

SEQ ID NO: 25636 - protein, 62 aa, Artificial Sequence
  Synthetic
KEAEDLLREAAKRAEELIRRAEEAAKRLKEEWERLIRELKRALEEYAKEAKKLIKELEDRTR

SEQ ID NO: 25637 - protein, 62 aa, Artificial Sequence
  Synthetic
SKREEAEKAARRAEKLAREAREAARRSLERAKDLARRHEKLSRELLEEAKRLAEEVKETAKK

SEQ ID NO: 25638 - protein, 56 aa, Artificial Sequence
  Synthetic
IDEALKALKRAADLSADANRRALEALEKAARLSARAAEEALEALRRAAELARRAAE

SEQ ID NO: 25639 - protein, 57 aa, Artificial Sequence
  Synthetic
SAEDIIRESEKADKDALDEWRRLIKKLEDLIEELLKENERLIRKLEELIKKALEADK

SEQ ID NO: 25640 - protein, 56 aa, Artificial Sequence
  Synthetic
GEEAAERAKRAADEAKKASDEAAKEAREAAERALRAAEEAAKEAEKANRDALRSAK

SEQ ID NO: 25641 - protein, 61 aa, Artificial Sequence
  Synthetic
SEDEELAKEAKRAVEEAKKRLEDLLRRAEEAHRRAKKELDELARRAEEAHKKAKRDIDRDA

SEQ ID NO: 25642 - protein, 62 aa, Artificial Sequence
  Synthetic
EEIVRRADELAKRAEELNRRLAEEADKIAKKAKDLNERLLREARDIARRAKELIKRLLDARR

SEQ ID NO: 25643 - protein, 56 aa, Artificial Sequence
  Synthetic
SKAERVVDEARKTDEEVLREAEKVNRKVEEVIRRVLKRNEDVNREIARAIERVLRG

SEQ ID NO: 25644 - protein, 59 aa, Artificial Sequence
  Synthetic
EEVLRTAEEVVREALRLVTDAHRVNEEVIRDVLRLVERVHRVYEEVNRRNDELLKELTD

SEQ ID NO: 25645 - protein, 58 aa, Artificial Sequence
  Synthetic
KDEERLREILKKYKEDSERILREVREILERYRRAIEEILKRLEDILRKLEEDVRRELK

SEQ ID NO: 25646 - protein, 55 aa, Artificial Sequence
  Synthetic
TKALKTVRDVLELLRKILEEVRRLNEKLLEELKRLLDEVVEKNERLIKLLEKDAE

SEQ ID NO: 25647 - protein, 57 aa, Artificial Sequence
  Synthetic
DELETLEDVLRKIEDLLRRWLEKLEETLKRIIRLLETSLKLLEESIRRILRILERDV

SEQ ID NO: 25648 - protein, 58 aa, Artificial Sequence
  Synthetic
KKVRDVLREIEELLERHKRLLEKLARELRELAKRHREEIKKVLETLKKLAEELTRRVR

SEQ ID NO: 25649 - protein, 60 aa, Artificial Sequence
  Synthetic
SEKEELRRELEEHAKRSRDTVKRLEDENRRVLESLKRKVDTLRRINEETLREIRRLAREE

SEQ ID NO: 25650 - protein, 55 aa, Artificial Sequence
  Synthetic
EKLKRDLEDLKRKHDELRKRLKEELDELRRKHEKIKEELDRHLKELEDKLREARR

SEQ ID NO: 25651 - protein, 60 aa, Artificial Sequence
  Synthetic
SEKEKLTEILRRHERESERVVKELDEENKRHLKKSREIADTLRKLNEETLERIRELVKRA

SEQ ID NO: 25652 - protein, 55 aa, Artificial Sequence
  Synthetic
ETLKRELERLKEEHERLKEELDRHLKALEEKHREIRREIDEHLKELKRRLDEERR

SEQ ID NO: 25653 - protein, 60 aa, Artificial Sequence
  Synthetic
SEKEKLIEDLRRILKETEERLKRVKERLRELLDEYRRRSEDKLRELKKELEEEEEKIRRS

SEQ ID NO: 25654 - protein, 62 aa, Artificial Sequence
  Synthetic
DRLRKRIKETADRLREMLKRHRELLERSMELLRRALEEAKKVLDETEETARRLLKLAEDEER

SEQ ID NO: 25655 - protein, 60 aa, Artificial Sequence
  Synthetic
KEIEETLKELEDLNREMVETNRRVLEETRRLNKETVDRVKATLDELRKMLKKLVDDVRKE

SEQ ID NO: 25656 - protein, 55 aa, Artificial Sequence
  Synthetic
KKVEELEKALEEIKRRLKEVIDRYEDELRKLRKEYKEKIDKYERKLEEIERRERT

SEQ ID NO: 25657 - protein, 57 aa, Artificial Sequence
  Synthetic
SEEEDREREYEERHKKAEEDLRRAEEEYARELRREEERLKEEAKRLEKELRDARTKL

SEQ ID NO: 25658 - protein, 59 aa, Artificial Sequence
  Synthetic
EKAKKALDEAVKRVKEDIKRLEDSVKTADDKDRKAIRRAEETVRTHIRTNEEAVRREEK

SEQ ID NO: 25659 - protein, 56 aa, Artificial Sequence
  Synthetic
SELEETLKRLKETNKRLLKKVKELVDESLRLNEELLRRLREVIRKIKETIKEVLEE

SEQ ID NO: 25660 - protein, 55 aa, Artificial Sequence
  Synthetic
ERVDELRKRIRKTEEEIEDIKRRYEKRVRELKETLDRIVKELRDRYKKIREEIDT

SEQ ID NO: 25661 - protein, 59 aa, Artificial Sequence
  Synthetic
DIEDVLKKVLEKNLRVLREVHEVNKRVLDEIVKLLRELHRVNKRVLEIILRLLEALRRG

SEQ ID NO: 25662 - protein, 56 aa, Artificial Sequence
  Synthetic
DEDLKRIEDELRRTLEEHRKRLREVERELEKKVEEHERELRKYEEETKRLLREAER

SEQ ID NO: 25663 - protein, 61 aa, Artificial Sequence
  Synthetic
REEERLRELITDYKRKLDDLKRRSEDLLREYEKTLEDIRRESERTKKELRESLKRDLDREG

SEQ ID NO: 25664 - protein, 55 aa, Artificial Sequence
  Synthetic
EKVKRELEKHTKLLKEILDTVRDLNRKHSEEIRRTVEEVRKANRRLLEELKETRK

SEQ ID NO: 25665 - protein, 60 aa, Artificial Sequence
  Synthetic
SELEETLKKIKELAEISRKLADETRREIKKLIDDSRKLLEDTHRTNEEMVRRVETKAKDK

SEQ ID NO: 25666 - protein, 59 aa, Artificial Sequence
  Synthetic
EEKLREVRELLERYREDVRRLKKEYEELLREEDKKVKKKKEDYERILRKTKKELDERRK

SEQ ID NO: 25667 - protein, 59 aa, Artificial Sequence
  Synthetic
SEDEKAAEDLKKLAEESIRELEKALRDAARLHEEALKRLKKALDEAARLAERAIEEARK

SEQ ID NO: 25668 - protein, 55 aa, Artificial Sequence
  Synthetic
EELIKLIEDLLRLAAELAKKIAELAERHLRLLEEAARKHIELVERLIELAKRDTD

SEQ ID NO: 25669 - protein, 60 aa, Artificial Sequence
  Synthetic
SEDEELEKLLEEAKKLIEESSRRLDELLEEDRRVVKRIEEEVEKLLKEVKEEIDKIKKEV

SEQ ID NO: 25670 - protein, 54 aa, Artificial Sequence
  Synthetic
KVLEIVKEIIDRIRKLLKKTFDISDELLRKWEDLLRRNNDLSRRLLKEAEDKAR

SEQ ID NO: 25671 - protein, 60 aa, Artificial Sequence
  Synthetic
SEKEDLARKLRKLVEELTREYEELVKKLERLIEEIEKVSEESVRKLEKLLREISEEVRKL

SEQ ID NO: 25672 - protein, 59 aa, Artificial Sequence
  Synthetic
DELLRKLVELLVEVLRRLIRVNRELVKLLREVLERLLRILRESVKKLKRLIEKVIKDET

SEQ ID NO: 25673 - protein, 57 aa, Artificial Sequence
  Synthetic
KEEEDLLERVKRVLDELIEIVDRNHELNRRVVETSARLVERLLEEVERALETLEREI

SEQ ID NO: 25674 - protein, 59 aa, Artificial Sequence
  Synthetic
SRLVKKLDEIVKEVAKKLEDVVRRNEELWRKLVELNKESVRRLREIVERVARDLEETAR

SEQ ID NO: 25675 - protein, 59 aa, Artificial Sequence
  Synthetic
RRTEEVIKKIAKLIDELIETLKKIVEDSAKLIKELIDLLEEIIKRSADLIRELEKVSKR

SEQ ID NO: 25676 - protein, 56 aa, Artificial Sequence
  Synthetic
ERRIAERIRELLRESKKLVRDVVEEAKRLLKENRDSTRKIIEDIRRLLRKIEDSTR

SEQ ID NO: 25677 - protein, 59 aa, Artificial Sequence
  Synthetic
DKEDIIRRLARVLERHDEANREVVKEHDEVLEEHLDVHRRVVRSNIEVLRTLLELVEKL

SEQ ID NO: 25678 - protein, 56 aa, Artificial Sequence
  Synthetic
EKDIRKVIEDIERLHRESMEEVRKLVEEIKRLNKEVLKRSEELVEEAKRLLKEVAD

SEQ ID NO: 25679 - protein, 59 aa, Artificial Sequence
  Synthetic
DTKEVIEKLIRVLERAVKLLRELVDRDNRSLKKAVDLHREVVRKIIEVLEEAVRLLATV

SEQ ID NO: 25680 - protein, 60 aa, Artificial Sequence
  Synthetic
EEKLLREVERLVRELAKRLRESLKTVEDLVRELADTNRRSVKTVEDIVRDLERKAREVTR

SEQ ID NO: 25681 - protein, 60 aa, Artificial Sequence
  Synthetic
SKRELLERVIREAERVLKEWEDLLRELTETSDRVIRDVERLLRELLRKAEEVIKDILRKS

SEQ ID NO: 25682 - protein, 59 aa, Artificial Sequence
  Synthetic
EDLKRVLERLTRVAEEILELLEEVLKKSNRSLEKAVEANAEALDRLIEVLRELLDDLRK

SEQ ID NO: 25683 - protein, 60 aa, Artificial Sequence
  Synthetic
SKEELLKKVEDEARKVLEEWKEEVKRLIEESKRVLDDWRRLVDEVSKDIKRVIDEARKDS

SEQ ID NO: 25684 - protein, 59 aa, Artificial Sequence
  Synthetic
EDLKRVLEKLIKVIEKIVRLNEEALRKSNESLERIVKLNEEALRELIRVIERLVELVRK

SEQ ID NO: 25685 - protein, 55 aa, Artificial Sequence
  Synthetic
KEREEIDELVKELEKELRRLVRENEKLVEDNERTLKRLLEENKRLVEELVKRLRD

SEQ ID NO: 25686 - protein, 57 aa, Artificial Sequence
  Synthetic
KDEVVEIVIRVLEEILRLSEEALRIHIRVTREVLRLSKELIDEIRKVLREIADRIRK

SEQ ID NO: 25687 - protein, 59 aa, Artificial Sequence
  Synthetic
SKEELLKELLDRVRRVLTEIKKLLERLLRRSKEVIDDSERLVREVLKRVEDLAREIKAE

SEQ ID NO: 25688 - protein, 59 aa, Artificial Sequence
  Synthetic
KDALDKLRRLIDELARLLREVHERDKELIRDHLREVEEIAKEIARLIKRLAEEIREITT

SEQ ID NO: 25689 - protein, 60 aa, Artificial Sequence
  Synthetic
SERELAKRALERAKEAAEESKRLAKELLDRSRELAKRSKELADEVLKRAKKAAEEIKKKR

SEQ ID NO: 25690 - protein, 59 aa, Artificial Sequence
  Synthetic
KDAAREARKLLKDLLELAERAHKKDRDAIEEHLRLAEEASKRDKELLKELLDLIREIAR

SEQ ID NO: 25691 - protein, 56 aa, Artificial Sequence
  Synthetic
SKEEEVEKVLRKWEEILRRLIEENKRANDKIRREYEELVKEIRRVLEEIKEVAERL

SEQ ID NO: 25692 - protein, 56 aa, Artificial Sequence
  Synthetic
KDVVRKLIEVIERLLRVAEEVIRRILKVNTELMRVDERSIRESLKAIREVLKVLDT

SEQ ID NO: 25693 - protein, 60 aa, Artificial Sequence
  Synthetic
SKEELVDTVKKKLEEVLKKIDKLSRDVKEKLRRVIEELRKLSREVHETNREVARRLREEA

SEQ ID NO: 25694 - protein, 60 aa, Artificial Sequence
  Synthetic
EETVLRTLEKIIRDHNKAHKRVTDAVAKILEELIKLHDEVSRRLKDILRRLLELLDEVTR

SEQ ID NO: 25695 - protein, 60 aa, Artificial Sequence
  Synthetic
RKEELVDTVKKDLERVIETVRKLSEDVKEKIRRVLEDIDRLSKEVHETNKRVVEELEDKK

SEQ ID NO: 25696 - protein, 60 aa, Artificial Sequence
  Synthetic
EETVLRELVKLIRDHNRMHEEVVRRLKKIIEEALKLHDEVSRRVAELLREVIELLDRVAK

SEQ ID NO: 25697 - protein, 60 aa, Artificial Sequence
  Synthetic
DKEREVDEILRRVTKLLKELEKRSKEILDRVRELVREYKRKVEEILKRVEDLIRRLIKDK

SEQ ID NO: 25698 - protein, 55 aa, Artificial Sequence
  Synthetic
DELRKILKELEELLRTLNKELKEVVKELRELLKELHDRLREILEELKRLLEEIAR

SEQ ID NO: 25699 - protein, 60 aa, Artificial Sequence
  Synthetic
DEDELIRKLLEDLKDIVRKILELIERDLRDIERVVRRIVKVIRDDLKKIKEVVDDIRRRV

SEQ ID NO: 25700 - protein, 59 aa, Artificial Sequence
  Synthetic
SELADRIRKLIEDLERHTKKVLEDVKRAITELRKNSKDILEEVRKLIDELRKRIKEVED

SEQ ID NO: 25701 - protein, 56 aa, Artificial Sequence
  Synthetic
KAEEIAKIAVDAVRKIAELLRRASKINLDAIRKAAKLSKEASKINLDAIRKIAEEV

SEQ ID NO: 25702 - protein, 56 aa, Artificial Sequence
  Synthetic
RKALEKARKLAEDALRANKRANDEAKKLADEALKENRKALEDAKRLARKAAEDAKR

SEQ ID NO: 25703 - protein, 59 aa, Artificial Sequence
  Synthetic
SEEELLRRIRELLKKALEDNKDVLREIEELLRKVTEDNDRVLEEIRKLLEEVDEVVKRA

SEQ ID NO: 25704 - protein, 59 aa, Artificial Sequence
  Synthetic
DELRRVVEKIEKVLRDVVRALRELVRINARVLEEILRLIEELVRRNAEVLKRILELVAT

SEQ ID NO: 25705 - protein, 61 aa, Artificial Sequence
  Synthetic
SKEDELRKAEEDARRVVEEILDLNRESVEKSRRVAERVLRLNEDSVRKSRDVVRRIKEEVN

SEQ ID NO: 25706 - protein, 54 aa, Artificial Sequence
  Synthetic
VVRKLIEANEDHLRVNKEIVDRLIKANEEHLEVNRRAVEKLIEVLKRLLDVARK

SEQ ID NO: 25707 - protein, 60 aa, Artificial Sequence
  Synthetic
SEKEDLVRTIEEVVKTIEELVERHERKIDEIVKRSRELVRTHVEKIEEIVRRVEELVRRG

SEQ ID NO: 25708 - protein, 57 aa, Artificial Sequence
  Synthetic
LDTLAEEVKRVLKEHVDLVRKAARLDSETLKKHVDLVRTAAERVSEVMKELVELVRR

SEQ ID NO: 25709 - protein, 60 aa, Artificial Sequence
  Synthetic
SEIEELVKDIERIVREIKKLIDDHVRKLEKIIEDIERDMRRHEETVREVVRKIEDEVRRG

SEQ ID NO: 25710 - protein, 57 aa, Artificial Sequence
  Synthetic
LDSLAKKVSDVARKHLDLARRVIKLISEALKKHIRLVEKAMEDISRILEDLVRLVRK

SEQ ID NO: 25711 - protein, 60 aa, Artificial Sequence
  Synthetic
SKLEDAVRRIEEILRHIVRSLEEVVKDIEKILRDHVRMLREVVKRIEDVLRRVVELLRRA

SEQ ID NO: 25712 - protein, 56 aa, Artificial Sequence
  Synthetic
KDVLREVAERIRKVIERLKELLDRSRERAEDVIKKLRDLLKENERLIEEVRRRLEK

SEQ ID NO: 25713 - protein, 57 aa, Artificial Sequence
  Synthetic
SREEAVADVIRRLEEILEKNLRLLEEIIRRLLRILEHNLRLNEKAVEIIEDLIRKLL

SEQ ID NO: 25714 - protein, 56 aa, Artificial Sequence
  Synthetic
SRLADDLRRVVKKIVEDLEENLERIKDIIRRLVEELERSLEEIRRLIDRLVKEIRR

SEQ ID NO: 25715 - protein, 58 aa, Artificial Sequence
  Synthetic
SEEEAAREAERLLEEAARVAERIVRDSERLLDEAAEVARKAVEDSKKLLEDALRAARE

SEQ ID NO: 25716 - protein, 56 aa, Artificial Sequence
  Synthetic
REAAERVARRAERANEEALKEAEEVIKRAKEANKRALEEAKRVIDRADKALKEARK

SEQ ID NO: 25717 - protein, 59 aa, Artificial Sequence
  Synthetic
RDRDVLRKVKREIEELVRRIEKVSRDALKEVKRLLDENRKIAEDVLRLIERLLRKIRDT

SEQ ID NO: 25718 - protein, 59 aa, Artificial Sequence
  Synthetic
EEVVEELLRMLKRVAEEMKRVHDDLSRAVEKVVRDVVRVDKELLDELRRILRRLEEVIT

SEQ ID NO: 25719 - protein, 56 aa, Artificial Sequence
  Synthetic
SKDEELMRLLEELVERWRKIVEDLERDHRRLVKEIRELVERIRKKLEELVDRIRKN

SEQ ID NO: 25720 - protein, 58 aa, Artificial Sequence
  Synthetic
EEIRRILEELKRIVDDVLRIIARILKLLRDLTRRLAEVAKKVHKLLEELLRKLKEDTR

SEQ ID NO: 25721 - protein, 56 aa, Artificial Sequence
  Synthetic
KDAETLEKVLRDVLERADEIIKRLEDIYREIKKRLEAIIKEAEDINRKILEEIRRL

SEQ ID NO: 25722 - protein, 56 aa, Artificial Sequence
  Synthetic
VKRALEELKDLIDRNLKVLKDLLDATRKLIEENIRVLREILKRIKDIARELLEATK

SEQ ID NO: 25723 - protein, 61 aa, Artificial Sequence
  Synthetic
SSKEEVLELIKELVRSSKEVLERVVRLNEKSLRISVEVLDRIVELIEEIVRIVVRELEKKV

SEQ ID NO: 25724 - protein, 55 aa, Artificial Sequence
  Synthetic
RELLKEIKRIIEEIDRLVKESLKRHKDINDEIRELAKRTLDEIKEVIDRIRERLR

SEQ ID NO: 25725 - protein, 60 aa, Artificial Sequence
  Synthetic
SEEEDVIRDVKRRLEEILKTNADVIRDIEEILKEVKERNKRVVEELKDILRKVLEELRKK

SEQ ID NO: 25726 - protein, 55 aa, Artificial Sequence
  Synthetic
KEVVDLIREIVERLARAVEESLKLLKEIIDLLTESSKELVKLLEEILRTLKEAAR

SEQ ID NO: 25727 - protein, 56 aa, Artificial Sequence
  Synthetic
SDEERLEKVVKDVIEKVRRILEKWKKDIDKVVKELRRILEEWEKIIREVLDKVRRL

SEQ ID NO: 25728 - protein, 56 aa, Artificial Sequence
  Synthetic
ERLLKRVVDILKRLLELNATTIERLLRILEELLKLNKELAERVIRVLEKLLEEIKR

SEQ ID NO: 25729 - protein, 60 aa, Artificial Sequence
  Synthetic
KDMERVLTEHKKAVKELIELLERLLEEHERASRELIKLLRELLERHKRATDELIKLLREN

SEQ ID NO: 25730 - protein, 56 aa, Artificial Sequence
  Synthetic
VEEVVKRLEDVNRTLEEIIRKVEEEAKRVNEDLRKRIEDVVRTLEEVNKRLKEITK

SEQ ID NO: 25731 - protein, 56 aa, Artificial Sequence
  Synthetic
SELEEVAELLKRSKELIDEVEERIRRLATESLRFLDEVVRRIRELLTRLLKEVRDS

SEQ ID NO: 25732 - protein, 55 aa, Artificial Sequence
  Synthetic
ERLLKKTEDVVREILRLIEEVLRTHAEIIREILELIERLLELHKTLVDRLLERIE

SEQ ID NO: 25733 - protein, 56 aa, Artificial Sequence
  Synthetic
SVLETVKRLAEESSERIRKIVEDDKRVADDSSRKIKELIEEIKRRVKELLDRIKDL

SEQ ID NO: 25734 - protein, 56 aa, Artificial Sequence
  Synthetic
KEVVIRLIEELVKLLEDVLRRLLEVNETLVELNKRVWDRLVRINEELAEVALRVAT

SEQ ID NO: 25735 - protein, 56 aa, Artificial Sequence
  Synthetic
SVLETVKKLLEDSSEKIERIVEEDERVAKESSDRIRRLVEEDKRVADEILDLIEKI

SEQ ID NO: 25736 - protein, 56 aa, Artificial Sequence
  Synthetic
KDAVIKVIEKLIRANKRVWDALLKINEDLVRVNKTVWKELLRVNEKLARDLERVVK

SEQ ID NO: 25737 - protein, 59 aa, Artificial Sequence
  Synthetic
SIRELLKELEDVVREIIRDIRRLLEESRRVVERIERETKRLLDEIRDVARRIEETIRRL

SEQ ID NO: 25738 - protein, 59 aa, Artificial Sequence
  Synthetic
KEAVDELRRLLEELKKIVEDILRTLEKLNRELLEIDKRVADRLRELLRTLKKLIEEAAT

SEQ ID NO: 25739 - protein, 57 aa, Artificial Sequence
  Synthetic
SKEEAIKELLKKHKRITEDIIRMARELDREHEEITREIAERLRRLLKKLLDDVRREV

SEQ ID NO: 25740 - protein, 55 aa, Artificial Sequence
  Synthetic
ERAKRVLDKILDDVRRLVEEAAKLLDESVKKSTDIVRRVRKLLDDSLKEVAELAK

SEQ ID NO: 25741 - protein, 57 aa, Artificial Sequence
  Synthetic
KKEDDVRRLLKEHEDITREIIKLIRDLARKHLELNKRVIRALEKVLKDLEDEVRKDV

SEQ ID NO: 25742 - protein, 55 aa, Artificial Sequence
  Synthetic
ERVRRVLDRVVERVAELVREWKELLKRSLDEVREVVKRARDMLRRSVKTVKELVD

SEQ ID NO: 25743 - protein, 58 aa, Artificial Sequence
  Synthetic
DEVEDARKKLEDLERENRKVIKEIEDALRELVKDHDRVVEELRRRLRRLLEELKKLVD

SEQ ID NO: 25744 - protein, 60 aa, Artificial Sequence
  Synthetic
DEEMLKRVVDVLEDLVRTIEKVLRELSETLRELVRRLLELLRENNESVRRLIRILEEALR

SEQ ID NO: 25745 - protein, 60 aa, Artificial Sequence
  Synthetic
SEDEAAERLLREAKKILKRLEDAARESLKSAERILEELEKAARDSLRKAEKIIRDAKRKG

SEQ ID NO: 25746 - protein, 55 aa, Artificial Sequence
  Synthetic
KEAEKLATKLVEDSERAAREAKKLADENVKRSKEAAEEAKRLADRLVKEAEDDAR

SEQ ID NO: 25747 - protein, 59 aa, Artificial Sequence
  Synthetic
SEDEELLKRLDELLKEILKVIEELIRRLEKAHKENMDKIRDSARRLRELLRKLAEDERE

SEQ ID NO: 25748 - protein, 56 aa, Artificial Sequence
  Synthetic
EELVKEILERVDRLLRKSLERLREVLEESRRRLEEVLRALEEVIKRVRDLLRKLRE

SEQ ID NO: 25749 - protein, 57 aa, Artificial Sequence
  Synthetic
RKKEELARVLEESLEVNRKLVRDLAEVLRKDLEIIRELVKRLVEILKKILKVLADVI

SEQ ID NO: 25750 - protein, 59 aa, Artificial Sequence
  Synthetic
EETLRKVVEDLERLLREARRVVKEAVEKSRRSLEDLRRIIEEAIRRNEKILRKLKEIVK

SEQ ID NO: 25751 - protein, 59 aa, Artificial Sequence
  Synthetic
KEDELLRRIKEVIDKTLEDMKRLLKKHKELLDEILRLLAELVEENKKLIDEILKLVEDS

SEQ ID NO: 25752 - protein, 59 aa, Artificial Sequence
  Synthetic
EEAKELVRRLKRAVEESKKKLDELVKDVKRLADDSARDLRELVKRIAELVKKIRDELRD

SEQ ID NO: 25753 - protein, 63 aa, Artificial Sequence
  Synthetic
DAEEALKRAREVLKEAADLNRKAVEDARKILKDAADDNKRALEEAERVLRKALEDAKDARARN

SEQ ID NO: 25754 - protein, 56 aa, Artificial Sequence
  Synthetic
AEKAAEDAKRLLEEAEEASKKLIKAAEELLRELAKASKRALDEARKLIEEAEKAAR

SEQ ID NO: 25755 - protein, 61 aa, Artificial Sequence
  Synthetic
SEREDLLRLIEEVIRELIKLLETNLRLNEETIRTLIRLIKKDLDLNRRSVEELVKLLKERV

SEQ ID NO: 25756 - protein, 59 aa, Artificial Sequence
  Synthetic
SEAADEVRKKLAEDERLNDKSLEELKRILDKDREINRRVAEKLTRILETLRKIIEDVAR

SEQ ID NO: 25757 - protein, 58 aa, Artificial Sequence
  Synthetic
DDLERVLDELRRIIEEIKRRIDKILEDYERVLRDAKRLIDDVLREYRRIIEELKDLLD

SEQ ID NO: 25758 - protein, 59 aa, Artificial Sequence
  Synthetic
KDVLERIKRLLDELRRANEEVVRRVKKILDESLKENRDVVRELKKILDELLEIVAEAAR

SEQ ID NO: 25759 - protein, 57 aa, Artificial Sequence
  Synthetic
SKKERLKKLIKEHLDLLRRLLKELEDLIRKHLELLRRLLRRLKELLRELLKLIEELV

SEQ ID NO: 25760 - protein, 54 aa, Artificial Sequence
  Synthetic
RVEKEVRRALEKVERLIREIKRLVERSLEEVEKLIREIKKRVRDSLRKVKKESE

SEQ ID NO: 25761 - protein, 60 aa, Artificial Sequence
  Synthetic
DEIETVLKRLAELIKESLDLLRETLDELRKIIEESKKSLEDVLRRLKELIDRLRRLAEEK

SEQ ID NO: 25762 - protein, 60 aa, Artificial Sequence
  Synthetic
KDELLRRVEEILKRLLELIRRIIEEHRKILERLLETHEDLIRKHEEILRRLLKAADEERQ

SEQ ID NO: 25763 - protein, 60 aa, Artificial Sequence
  Synthetic
SEKEDVLRRVEEIARRVRDILRRNLEKVERIAEELKKINDDLLKEIERIIKELKEVLRDV

SEQ ID NO: 25764 - protein, 56 aa, Artificial Sequence
  Synthetic
IEEVLEILDRILKTARDVSKENLESLKRALELDRRTNERLEDLLREILELLRKDIQ

SEQ ID NO: 25765 - protein, 60 aa, Artificial Sequence
  Synthetic
SELEELRKLAEEAIEAAKRALDRLHKLSRELIEAAKEILKRLKKLSEDLIRAAEEAARRS

SEQ ID NO: 25766 - protein, 58 aa, Artificial Sequence
  Synthetic
EDAKRAKEIAKEAIERSKKIADEAREIAKRAIDKSKKIAEEAKKIADEVLKRAEDIAR

SEQ ID NO: 25767 - protein, 61 aa, Artificial Sequence
  Synthetic
RESEELIRLLRKIIELLEELVERIRDLLRKHLKLLEEVVELLKRNLDEILRLLEEVLREAN

SEQ ID NO: 25768 - protein, 58 aa, Artificial Sequence
  Synthetic
EKAKKLEELLRDLLRTVREIVKEVRELLEESLRTAEKLVEDIKRELDELRKRLKELVD

SEQ ID NO: 25769 - protein, 58 aa, Artificial Sequence
  Synthetic
DEERLVEEIIRTIKRVIELNEESLREIERVLEEVIKMDKRSLEEIKRVLDEILKLARD

SEQ ID NO: 25770 - protein, 60 aa, Artificial Sequence
  Synthetic
GEELERVLRELKKVLEELIKDNERVNDELRRVLEKLKERNRKVLEDIKRVLEELRDEVER

SEQ ID NO: 25771 - protein, 58 aa, Artificial Sequence
  Synthetic
SSEEIIRTLEKAIRESEEKLERLVRRDEEVVKDLRTKLRENLDRVRRMVEELVRMLES

SEQ ID NO: 25772 - protein, 60 aa, Artificial Sequence
  Synthetic
KDTLVKVLKEVLERHVEADEKAVRELAKVLEENVRLLEELVRVNKEVLRRILELVKELAK

SEQ ID NO: 25773 - protein, 57 aa, Artificial Sequence
  Synthetic
SKEEKLKDDVRRVLEDLDRVLKELEKLSEDNLRELKRVLDRITDLHRRILDELRKKI

SEQ ID NO: 25774 - protein, 59 aa, Artificial Sequence
  Synthetic
SKVAEDILRVLEKLVKVSREAIKLILELSEHHVRVSTRIARLLLDVARKLFEVIKEAER

SEQ ID NO: 25775 - protein, 57 aa, Artificial Sequence
  Synthetic
KKEDELEKMVRDVLEDLDRILREAEELSRKNNDDLRRVLDRLRRLAEEVIKRLEEKV

SEQ ID NO: 25776 - protein, 59 aa, Artificial Sequence
  Synthetic
SEVARVILEILKRLLKALKEAAEELKKISEHHLRVSEKVVRDLDRVVKKIVDVARRVAT

SEQ ID NO: 25777 - protein, 57 aa, Artificial Sequence
  Synthetic
SEKEKLLRDLEEVVRDVIRLSKESVDKLKETVDRLVEESRRTVEELRRIVDRVAKEV

SEQ ID NO: 25778 - protein, 58 aa, Artificial Sequence
  Synthetic
EIVKLLEDVVRELVEVLRKSTEVIERAVKKLVDILRESLKLIEDVVRRLVEIMEEIVR

SEQ ID NO: 25779 - protein, 61 aa, Artificial Sequence
  Synthetic
SEIEDVIRRLRKILEDLERVSEKLLREIKKILDEARRLNEEVIKEIKRVLEDAVRVFRDIR

SEQ ID NO: 25780 - protein, 56 aa, Artificial Sequence
  Synthetic
IEDLVREVERLIKRIEDSLRELEKTVRELLKRIKEASDKVREDVDRLIKELKEAAD

SEQ ID NO: 25781 - protein, 60 aa, Artificial Sequence
  Synthetic
SREEIVATLEDLARKILEVVKKLAKEIEDAWREIERKVREILKRLEELWREIEDVVRKKV

SEQ ID NO: 25782 - protein, 59 aa, Artificial Sequence
  Synthetic
RELVKELVELLEEILERNTRVIKEIIDLLRTVIRIHEKIVEDLIKLLEELLRRLEEATR

SEQ ID NO: 25783 - protein, 58 aa, Artificial Sequence
  Synthetic
KEKEDALKKLEDLARKSREDLERVLRKHKKILDKIEELLKRVLDEHKKIVDDILRKTG

SEQ ID NO: 25784 - protein, 59 aa, Artificial Sequence
  Synthetic
EELAREVERVIKELLDKSKEILERIERAIDELLKVSEEILKLSEDASEELLKILREFAK

SEQ ID NO: 25785 - protein, 58 aa, Artificial Sequence
  Synthetic
DEKEEALKTVERIIRDIVRRLRELLKEHEDIVREIERELKEVHEKHKRLVEKALEELG

SEQ ID NO: 25786 - protein, 59 aa, Artificial Sequence
  Synthetic
DRLADLIRRAVDRLRDISREILKRLVEVIERLLEVSEKILKLVEEVIRELLRVVEEAAK

SEQ ID NO: 25787 - protein, 59 aa, Artificial Sequence
  Synthetic
SVVEILAEVLKRLLDILRKLVDAIRDVVKKHVEVVEKLVRLHEEVLRRLVDILRKIAEV

SEQ ID NO: 25788 - protein, 60 aa, Artificial Sequence
  Synthetic
EEILRRLVEEAKRLVAESIKKLRDLVRKIREAHKEAIKRLEEIVRKVEEIVRKVIDELRK

SEQ ID NO: 25789 - protein, 62 aa, Artificial Sequence
  Synthetic
SDEEKLRRLLEEVRRLAKRVIDELERVLRESKRLAEENIEELDKALEEVKRLIDDVIKKLRD

SEQ ID NO: 25790 - protein, 60 aa, Artificial Sequence
  Synthetic
SETIERLLRELLKVLKEIVDRHRRIIERLLKASEDAVRELKKLIEETLRVLTDVVRRTET

SEQ ID NO: 25791 - protein, 56 aa, Artificial Sequence
  Synthetic
SLVDELRKSLERNVRVSEEVARRLKEALKRWVDVVRKVVEDLIRLNEDVVRVVEKV

SEQ ID NO: 25792 - protein, 56 aa, Artificial Sequence
  Synthetic
DEELKRVLEKAADLHRRLKDRHRKLLEDLERIIRELKKKLDEVVEENKRSVDELKR

SEQ ID NO: 25793 - protein, 55 aa, Artificial Sequence
  Synthetic
SKEERLREVAEKHKKDLEDIVKRVDEAAKETKRRLEEILKRLEEVLKKILDDLEK

SEQ ID NO: 25794 - protein, 55 aa, Artificial Sequence
  Synthetic
KEVLDILERAVEVVRRVIKALKEVLERHVDATREVIERVKRVNKRLLEAVREVVT

SEQ ID NO: 25795 - protein, 56 aa, Artificial Sequence
  Synthetic
SREEKLEELIKELERRLKDVLDRSRELNREIRKTTEEVIREVDRLLREIEKIVRDV

SEQ ID NO: 25796 - protein, 59 aa, Artificial Sequence
  Synthetic
EDTARLVREVAELIEKVVREIVKLIDEDLKKLERVVRENARLLREVVELLLKVVRDVAK

SEQ ID NO: 25797 - protein, 62 aa, Artificial Sequence
  Synthetic
DEKELLEEIIKKVEDLLRESRELWERLIKRVKELLKRSKETVDEILKRIKELLDELRKVAAE

SEQ ID NO: 25798 - protein, 60 aa, Artificial Sequence
  Synthetic
DKRLLDVIKEIVEKLIEVVRKLLEADKRIIEELIRVLEKIAEVDETIVKRLIEVLKKIAD

SEQ ID NO: 25799 - protein, 61 aa, Artificial Sequence
  Synthetic
SEEEDIERVLRELKKLHKDHLDLLREVVKRAEELLRRHLEILREVLKREKKLLKDVLRDAR

SEQ ID NO: 25800 - protein, 55 aa, Artificial Sequence
  Synthetic
DELLEEAKKLVKEVRELAEETLRRLARLVEDVKRLNDEAVKRLRELVRRIKEEVR

SEQ ID NO: 25801 - protein, 59 aa, Artificial Sequence
  Synthetic
RTEEILREIVDLLRRVAEENLRTLEELVELLDRVARRNLESLRELVRILEEVLKKLLKK

SEQ ID NO: 25802 - protein, 56 aa, Artificial Sequence
  Synthetic
EDVLRELDEVVRRVIERDREILRELKRLVEEVIRKNEDIVRKLEEAVERVLRKLKD

SEQ ID NO: 25803 - protein, 59 aa, Artificial Sequence
  Synthetic
SEKEEVIKDLRKVLEEVLRRHEELVERLKEVLRKVLEDHKKLVEDLKRVLDEVRRKLEN

SEQ ID NO: 25804 - protein, 57 aa, Artificial Sequence
  Synthetic
REELLRRLERIVEDIIRLLEESLKLAAEVIKTIIRLLEESLERLKRLVDDIVEKLRK

SEQ ID NO: 25805 - protein, 60 aa, Artificial Sequence
  Synthetic
SEKELLERLEEVERRLLEIVRRLLKRNRDVHEELLRIVEANLRRNKKVHEDLLEKVRKSV

SEQ ID NO: 25806 - protein, 59 aa, Artificial Sequence
  Synthetic
DKVVKELEDIVEELMEENKDSLRRLKEIVEELLEENRRVLEKLRKIVEDVARELEETAT

SEQ ID NO: 25807 - protein, 58 aa, Artificial Sequence
  Synthetic
SIEEVLREIVKLLREVLERLIRVDERLVEALKRVAEKNIEVLRRAVDALRKVLELLRR

SEQ ID NO: 25808 - protein, 57 aa, Artificial Sequence
  Synthetic
EETVIRRVEDVLRDLLRRLEEVVRRSTEEAKRLLKESRDVVRDVEKTLRELLEELRR

SEQ ID NO: 25809 - protein, 58 aa, Artificial Sequence
  Synthetic
SVEEVIRKAVTDLDRVLKTNIRVDERLIEMLKRVADENREVLEKIVRLLKEVLDLLRN

SEQ ID NO: 25810 - protein, 57 aa, Artificial Sequence
  Synthetic
EKEVVDKVKRVLDELRRDLERVVEESEKLARDLLRKSRDVVRRTRELLKKLLEEVET

SEQ ID NO: 25811 - protein, 64 aa, Artificial Sequence
  Synthetic
SRRETLEKLLKEIEDLIRESLERLEKLLEENRTLIDDDERRVRELARDIKELIKEIEERLRREN

SEQ ID NO: 25812 - protein, 55 aa, Artificial Sequence
  Synthetic
EEILKIIEELIKRLEKLNEDSNELMKELVKRNERLARENLKLVEELLRRIEETTR

SEQ ID NO: 25813 - protein, 56 aa, Artificial Sequence
  Synthetic
SEVERLRELVERWREELKKLLDELRKVVEEIARELKKINDELRKLVEDIAREARRE

SEQ ID NO: 25814 - protein, 56 aa, Artificial Sequence
  Synthetic
ERVIEELIRVLRKVVEDHADVTRRLVEVLRKVVKLIEEVLKKDEKVLRDIVDRLKT

SEQ ID NO: 25815 - protein, 57 aa, Artificial Sequence
  Synthetic
SEVEEVVRVLEKVLRLLRRLVEELHRLSERVLELITRLLKELKDLSREVIKRLEDAN

SEQ ID NO: 25816 - protein, 59 aa, Artificial Sequence
  Synthetic
KEKIDELRRVLERVEREHRRVIKKIRDVVEKVKRDHERVLREVEKVVREVRTELEKLRE

SEQ ID NO: 25817 - protein, 61 aa, Artificial Sequence
  Synthetic
SVEEELRELVKRVEKLVERLRRIVKEIIERSRDLVRKSREVVDRLKKELDELVKEVVREEG

SEQ ID NO: 25818 - protein, 59 aa, Artificial Sequence
  Synthetic
DEVIRRIAEVVKRLIDKLKELSDDNRKAVEDHERLVRKAIEELVREVEDILRRIDETAR

SEQ ID NO: 25819 - protein, 56 aa, Artificial Sequence
  Synthetic
SEKELLKEILDRIRELLEDDNRLLKRIVDEIRKLLEEWLRVHKEILERIKELLDRI

SEQ ID NO: 25820 - protein, 62 aa, Artificial Sequence
  Synthetic
EDMVRKIRKIIEELKRLLEDLRRDTRRVIEEAKRLLKEWRDRNKEVADTLKKLLEDLIRKIR

SEQ ID NO: 25821 - protein, 56 aa, Artificial Sequence
  Synthetic
REDEIVEDWRRLLEEAKRRSEEVAKEIRDRAREVTKESKRVADEWRRLLEEVKKRA

SEQ ID NO: 25822 - protein, 59 aa, Artificial Sequence
  Synthetic
EELVRVARDLVRLNEEVLRKSNRSVEELLKALARVLDRSNKSLEDLVELNKRVLDKLRT

SEQ ID NO: 25823 - protein, 59 aa, Artificial Sequence
  Synthetic
RKEDLVREWRELLRKILEDLEDLVRKWRKLLKKILDDLRELVRRVREELDKALRTVEKG

SEQ ID NO: 25824 - protein, 57 aa, Artificial Sequence
  Synthetic
LRDLVRKIIEIIEDILRLLEEVLRKNVKAVEEVLRLAIRVLEENIEAVEKVLEDVRR

SEQ ID NO: 25825 - protein, 58 aa, Artificial Sequence
  Synthetic
SEEELLREIEKILDEVRKLVEKLLEDNRRLADELIKLIKELLDRNLRLIERLLELLER

SEQ ID NO: 25826 - protein, 59 aa, Artificial Sequence
  Synthetic
EELREVLERALRKAKKIHEDLKRIVEDVRRRNDEILKDLERVLKEVEDKIRKILDELRK

SEQ ID NO: 25827 - protein, 59 aa, Artificial Sequence
  Synthetic
RDEDIKRELVRLVEEILRTSARLLDESIKSNKKTLDDIERVAREIVREIEELLKRIADG

SEQ ID NO: 25828 - protein, 55 aa, Artificial Sequence
  Synthetic
DELKKDIRDVLERVKRIAEELRELVERDIREDKRLLDELAKLWRDLLKMIEDLRR

SEQ ID NO: 25829 - protein, 61 aa, Artificial Sequence
  Synthetic
SEDELLEKIVRKLREAVKRIEEELRKSKREIERLVKEIKEKLEDSLRRVKETLDRIRETRK

SEQ ID NO: 25830 - protein, 56 aa, Artificial Sequence
  Synthetic
LEELLRLLKEVIERSIESLERLLELILRVLEYSVRSLEELLRRLLEVIKRIVDTTK

SEQ ID NO: 25831 - protein, 59 aa, Artificial Sequence
  Synthetic
DEDEIAEELKRLLREVEEKSKEIVRRMRELAREANKKSEDILRTLEKLLEELRRRVEEN

SEQ ID NO: 25832 - protein, 56 aa, Artificial Sequence
  Synthetic
IDEVVRRIERVIREVIKILARANKRLHDVVEEIIRLLEEVTDELRRVVEEVIRRTK

SEQ ID NO: 25833 - protein, 56 aa, Artificial Sequence
  Synthetic
DKEEEVRRLIEENLKKIEEVIRELEKIIRDNLRKLEEVVREIEEELETTLRLIETD

SEQ ID NO: 25834 - protein, 59 aa, Artificial Sequence
  Synthetic
EDLLRKLKELLETLKRRIDEIEKKLEEILKETKDLIRRLLEKLKRIDEELRKTLEDLRR

SEQ ID NO: 25835 - protein, 61 aa, Artificial Sequence
  Synthetic
DDIDEILRRLREEIEDARRKLEKILRELRERIKDYKRKTDELLKESRKRIREAEDRVRRDG

SEQ ID NO: 25836 - protein, 59 aa, Artificial Sequence
  Synthetic
DKVLEALLEKLLRSNEELVKIDRDLLRDLLRVLEELIKTVRDLLRELLRVLEEVAREIK

SEQ ID NO: 25837 - protein, 60 aa, Artificial Sequence
  Synthetic
REEETLRDIERLLRKLLEELKRTADELIDSHRKLIKKLKEILDRLRRSHEKLIETLRRRL

SEQ ID NO: 25838 - protein, 59 aa, Artificial Sequence
  Synthetic
EDVKRELREVVKEHKEDLDRIKKELKELLDRHTETLKRIVKKLRDLLEEIRKALEDLKK

SEQ ID NO: 25839 - protein, 59 aa, Artificial Sequence
  Synthetic
DEERVVEEAIRVLKEVLDLHRELIKRSIDVLKESLKVHERAVESLERVLKEILDLVRRG

SEQ ID NO: 25840 - protein, 56 aa, Artificial Sequence
  Synthetic
EEEVAERVKRIIEEVRKLAEDSRRKTEELIRRVKELAERTDETVRRVIEELRRRTK

SEQ ID NO: 25841 - protein, 59 aa, Artificial Sequence
  Synthetic
DEEDVARKLIEVLKELLKLVEDLIRTNIRVLEESLELHRRLIEEIEKVLKRILELLEEG

SEQ ID NO: 25842 - protein, 56 aa, Artificial Sequence
  Synthetic
REELAKEVKRVIEELKKLARESAEESKRIIRTIEELLREARKRAREVIEELKERTR

SEQ ID NO: 25843 - protein, 60 aa, Artificial Sequence
  Synthetic
DAEEVLRLLAEVLERIIELIKKVNEILIRVLREVIRLIEEVNELVREVLKRIIELIRRDI

SEQ ID NO: 25844 - protein, 55 aa, Artificial Sequence
  Synthetic
ERILEEIERLVREVEEIHERVLRRLKELLKKVREVHEEVLRRIERLAERVREALK

SEQ ID NO: 25845 - protein, 56 aa, Artificial Sequence
  Synthetic
SVREELEKVIREVIEEVERVLERIRDELRKSLERLKEVIKRIEDVHRDLIRRIREI

SEQ ID NO: 25846 - protein, 56 aa, Artificial Sequence
  Synthetic
IEEVLKTVEDISRRHRELLKRILDTSKRSIEETLKLAREILETLKRLLKELLDAAK

SEQ ID NO: 25847 - protein, 59 aa, Artificial Sequence
  Synthetic
DAEDEARRVIDEAVDRLRKAVEEIAEVARRHLEEVEEVVRKLEEIIRESLERVRRASEA

SEQ ID NO: 25848 - protein, 59 aa, Artificial Sequence
  Synthetic
DKEAEEVVRRVERLHEDVLRRLKEVVKRVKELHEEILDRLREILDRVRELARKVREDLR

SEQ ID NO: 25849 - protein, 56 aa, Artificial Sequence
  Synthetic
SEKERLSKIAEDLIRRLEEELERVERTHERLLRKLEELLKKIEKEYRDAMRKLETL

SEQ ID NO: 25850 - protein, 57 aa, Artificial Sequence
  Synthetic
IKEVLDDLKRVLERDLRAIKKIVKELKRILKENLDVLREIVERIKRVLEKILREVEK

SEQ ID NO: 25851 - protein, 60 aa, Artificial Sequence
  Synthetic
SREERLERVLERVKRAIDRYRDMLRRLLKTVEDLIRKYEEDLKRLLKEAKELIDKVKEEN

SEQ ID NO: 25852 - protein, 59 aa, Artificial Sequence
  Synthetic
EEIKKIIDRLREEIERILDELRRLNEELVETLRRVLETLRELNERLVKLLRDLLREEKK

SEQ ID NO: 25853 - protein, 60 aa, Artificial Sequence
  Synthetic
DEEEKMKKIEDVARRYKEEVKRVLDDLERLLRESEEEVERIVRKLEKLARDLEERVRELT

SEQ ID NO: 25854 - protein, 59 aa, Artificial Sequence
  Synthetic
KEVIDALKELLKVLEDLLREIKEALTRNLEKIDELLKLLHELSRRVIEELRKLLEDLKR

SEQ ID NO: 25855 - protein, 57 aa, Artificial Sequence
  Synthetic
REDEELARKAKEVLKETEDLLRKLEEEVKRVLEEIKRMNREVREKVKEVIKELRKRL

SEQ ID NO: 25856 - protein, 59 aa, Artificial Sequence
  Synthetic
KRLLDLLRDLLRLLKELLETLEKLNERTLKLLRDLLRKLKEALRRNLKLLRELVDEAAT

SEQ ID NO: 25857 - protein, 60 aa, Artificial Sequence
  Synthetic
SKDEIIKRIKDELEKLVRDVERLLRESERRIADLVRRVREILEESKRRVDELVKRVKETG

SEQ ID NO: 25858 - protein, 56 aa, Artificial Sequence
  Synthetic
VETILRVATEVVKESATVLKRILETLEEALKRNVRIIEEMLEILREVIERIARKLK

SEQ ID NO: 25859 - protein, 55 aa, Artificial Sequence
  Synthetic
SEEEILREIKRLLEEHLELNERILREIKKDNKRTLKELRDIVRELKEILERIKRR

SEQ ID NO: 25860 - protein, 55 aa, Artificial Sequence
  Synthetic
EELRKLLEDARRALERILRRLAKIVKEIKEKHEEVLRRLEKSVREIDERLRRARE

SEQ ID NO: 25861 - protein, 57 aa, Artificial Sequence
  Synthetic
SELERLERLLKEIVEVNRKALEDLRRVLEETVRRDREVLDRTRRKLEEIAEEILREL

SEQ ID NO: 25862 - protein, 59 aa, Artificial Sequence
  Synthetic
REDLKRLEDLVKRIEEELRRKLEKYERELRDLKRKLEELLKRYEEKVKELKRKLDEALK

SEQ ID NO: 25863 - protein, 57 aa, Artificial Sequence
  Synthetic
SEEEILRRIAEEIKRLIDEDLRLIEELVRKIKTVAKRDLELIARLVEKIEEVIRRSI

SEQ ID NO: 25864 - protein, 59 aa, Artificial Sequence
  Synthetic
EEELKTAEKIIEDIKKEIDDVHREVRRLLEEIKEDIDRVNEEVKKRLEDIIEKIRRAAK

SEQ ID NO: 25865 - protein, 59 aa, Artificial Sequence
  Synthetic
SIEELAEDIKKILDDALELLERLAKRAKEINDEILDELRKLVEKNKRDLDRALEKLRRE

SEQ ID NO: 25866 - protein, 58 aa, Artificial Sequence
  Synthetic
ERVRKLIRELEEELKDNRRLIEELVRRARKVNKRLRELVEEVIDRLRELLERIEEKIR

SEQ ID NO: 25867 - protein, 56 aa, Artificial Sequence
  Synthetic
SKEETLRKEAEDLLRRLEELTRRLEKKARELLERAKKLSRDLAEELKRLLKELREK

SEQ ID NO: 25868 - protein, 59 aa, Artificial Sequence
  Synthetic
ERLKRLVEELLKAVTDLSRKNKRILEELLKAIETLSDENKKILTEILDALRRLVEKIEK

SEQ ID NO: 25869 - protein, 60 aa, Artificial Sequence
  Synthetic
DEERKIVETLHRTSREVIKTLEKIVRDLKEVLKKNLELTERLIKRVHEVSREILRLTREN

SEQ ID NO: 25870 - protein, 59 aa, Artificial Sequence
  Synthetic
DRVKKELEDANREVNKKLEEVLREIRELHKRVLDRLDEVLRRVEEINKRVNERLDRTAK

SEQ ID NO: 25871 - protein, 57 aa, Artificial Sequence
  Synthetic
SEVEDLKRKLEEDLERHKKDVKRLKDEAERRLEEHKRLVEELERRIKKLLDELKDRN

SEQ ID NO: 25872 - protein, 55 aa, Artificial Sequence
  Synthetic
KDVLRDLERILTELAKALKDLIDNSRRTLEKLLKALRDLIRESKETLEEVLRRTD

SEQ ID NO: 25873 - protein, 56 aa, Artificial Sequence
  Synthetic
KEREEVKEKLDRLLEEVEKTVRELKREHDELLKEVEKLVRDLKKEHDELLKKVKDD

SEQ ID NO: 25874 - protein, 59 aa, Artificial Sequence
  Synthetic
KDRLDKVEELVKKLLEDTKRTVDRVRELVRKILKKSRETLEELERLIEKILRELEKDAR

SEQ ID NO: 25875 - protein, 56 aa, Artificial Sequence
  Synthetic
SERETVKRRLEELLKEVKRTLDKLKEEHDRLLEDVRRVVEELKREHDKLLKEVKDS

SEQ ID NO: 25876 - protein, 59 aa, Artificial Sequence
  Synthetic
DKRLEDISRLVKRLLDESRRVLRELEETIRKRAEESKRVLEEVKRLVEKLIRELRKEAE

SEQ ID NO: 25877 - protein, 59 aa, Artificial Sequence
  Synthetic
SEDEIIKKIIEDLRRVLKEVEEIHKEVEERLDKVLKEAEEMHKEVLKELDRVLDEVKRI

SEQ ID NO: 25878 - protein, 56 aa, Artificial Sequence
  Synthetic
ERLLEELIEELKDLIRRHIELLRRLIERLKELLKKHIEDLRRLLEEIEKLLEEARK

SEQ ID NO: 25879 - protein, 60 aa, Artificial Sequence
  Synthetic
SREDEVRKVVEKVLRDSKRSMKELRDVVTEVLKKSKEVLRELKEAVDRVLKKLKDISRDV

SEQ ID NO: 25880 - protein, 56 aa, Artificial Sequence
  Synthetic
EELVKELLEFLKRVLEKAERLVRKNLEDNKELLERLERLIEENLKLLEDLLRRTEK

SEQ ID NO: 25881 - protein, 59 aa, Artificial Sequence
  Synthetic
SEEEKLRELKEILDRTLKKIEDLIEESKRLNEEHVRLTREILDEIRRLLEELLRKLREA

SEQ ID NO: 25882 - protein, 59 aa, Artificial Sequence
  Synthetic
EEILKRIEDTLKRLKEELKRLVDEVRKHIEELLERSERLIRELRRTLEEILKRLKEKTD

SEQ ID NO: 25883 - protein, 63 aa, Artificial Sequence
  Synthetic
SAAELVLELLARVVKLLEEVLKRLIDLHRDVLKKIKDVLDRDHELHERVLRELVKVLREAERR

SEQ ID NO: 25884 - protein, 56 aa, Artificial Sequence
  Synthetic
REELEKRLRETLDEHRDLLRKLKEFLDRSLEDLERRVDEVRKELERVLEELKRKLK

SEQ ID NO: 25885 - protein, 57 aa, Artificial Sequence
  Synthetic
KEVEDIERVLRKALELSKKVSDDLERVLRELLKLSKEVIEKLVRVLEEILELLKREN

SEQ ID NO: 25886 - protein, 59 aa, Artificial Sequence
  Synthetic
EEDLRRVRELIKKVLKDLERVLKEAEDLHREVLEKLKDVVRRAAEMHEEVIRALKEVSR

SEQ ID NO: 25887 - protein, 59 aa, Artificial Sequence
  Synthetic
DEEELLREIKTILDESLKALEELIRKIMRILDKSLKDLEEIVREIKKTIDELLEKVRRS

SEQ ID NO: 25888 - protein, 55 aa, Artificial Sequence
  Synthetic
EEALDDLRRLVKELKDKLRKLLKDYKDLLKELKDEAKKLLDDYRRLIEELEKKAR

SEQ ID NO: 25889 - protein, 59 aa, Artificial Sequence
  Synthetic
SEKEKLDELRKLIEEIERELDRLLEDNKRAVEKVLRDLDRLLKKSEDDVRRVEEELDKD

SEQ ID NO: 25890 - protein, 59 aa, Artificial Sequence
  Synthetic
KDLAERIRKILDDLLEVHERVARAIEELLRELLEKNEEIVRTIKKLLKRLLDTLRKAAE

SEQ ID NO: 25891 - protein, 58 aa, Artificial Sequence
  Synthetic
SKLETVIRILEELVKVHEELLRIVKKILEELVRVHRRVSEENLRLWKELLDALREDKG

SEQ ID NO: 25892 - protein, 55 aa, Artificial Sequence
  Synthetic
EELLKRVEDVNRESRKVLEESLRRVEEALEKIERALRKSEEDIRRLMEDIKRVLK

SEQ ID NO: 25893 - protein, 60 aa, Artificial Sequence
  Synthetic
SREEKIEKLIRLVEELLERLRELLERNAELIKRLLDRLRELLKELERLNEELLKKLLEKV

SEQ ID NO: 25894 - protein, 55 aa, Artificial Sequence
  Synthetic
RELEELIKKVERDHERVIKEVEKLVKELLDRSEEIHKRAKELIKEVLDRVREAAR

SEQ ID NO: 25895 - protein, 60 aa, Artificial Sequence
  Synthetic
SREELLDRILEAIAKILEDLKRLIDENLRRLEEVVRELERIIDRNLKLIREILDELKKRG

SEQ ID NO: 25896 - protein, 59 aa, Artificial Sequence
  Synthetic
DEIIRKLDELLKEVEKVHKEVKDRIRKLLEDHKRSLDEVKKKLERLLERAKEVVEREKK

SEQ ID NO: 25897 - protein, 61 aa, Artificial Sequence
  Synthetic
SEREELLERIKEILKRVKDKLDEDLKRLKEILEKLKEKADRDLEELRRRIEEVREKLERTG

SEQ ID NO: 25898 - protein, 60 aa, Artificial Sequence
  Synthetic
SETAVRAIIRVLEKHLEAVRRVLEELLKVLAEHLETVRELIERLKRVLEEAIEVVERVAR

SEQ ID NO: 25899 - protein, 60 aa, Artificial Sequence
  Synthetic
DEERKLKELLDRLRENIRALRELIKDNLRLLKTLVDALEELLKDNLRLLRELAEEAARRL

SEQ ID NO: 25900 - protein, 59 aa, Artificial Sequence
  Synthetic
EKDVRELIKRVETALRESEEKLRRVAEELKKALDRSRKDLEEVVRRTEDLLRRLEEKLR

SEQ ID NO: 25901 - protein, 60 aa, Artificial Sequence
  Synthetic
SEEETVRRLLELLKENIEELRELLKRNLDLLRKLAEELKKLIEELARITERLAEKLAKDL

SEQ ID NO: 25902 - protein, 59 aa, Artificial Sequence
  Synthetic
EEEVRKLVEELRRAVKRVRDLLDELRRRLEEALRKSKRELETIEERTRRLLEDIKRDLD

SEQ ID NO: 25903 - protein, 60 aa, Artificial Sequence
  Synthetic
SEEEEIVKRLKELIKRNLELLDKTLKELKKTLEDIIRTLTELVKRAKEINKELIDRLREK

SEQ ID NO: 25904 - protein, 56 aa, Artificial Sequence
  Synthetic
REDIRRYEEKLRKLVEEVKKKLRDLEERLRRLVEKIRKLLEDSERRLRTMLDEIRR

SEQ ID NO: 25905 - protein, 61 aa, Artificial Sequence
  Synthetic
REKEEKVKKVREVVTELKRELDDMLRRVKEAHERLKKKHDDLLKEVREVHKRLKDRLDERG

SEQ ID NO: 25906 - protein, 59 aa, Artificial Sequence
  Synthetic
EEIKKTIEEIIKVLRELNDKLRRLSEDTIRVLEELNKEIARLLEKLVRDTKRLLDELTK

SEQ ID NO: 25907 - protein, 59 aa, Artificial Sequence
  Synthetic
SVKEVIKEVLDRVVKLIKDVIDALKTVLDRHLRLNRENIRALLEVLERILELLEELVRK

SEQ ID NO: 25908 - protein, 57 aa, Artificial Sequence
  Synthetic
LEKLLRKVRKIAKELADELRKLHREVKETHEDLKRKLDKLLKDIRKVVEDIKREVDR

SEQ ID NO: 25909 - protein, 60 aa, Artificial Sequence
  Synthetic
EKEELVEEILRRLKKMSERFSRVVEEILKLLEDSSRKVEEAIRRTIRELEKTLKRVEKDG

SEQ ID NO: 25910 - protein, 56 aa, Artificial Sequence
  Synthetic
SRELREAVKKVIADLEKILKDLRKLDKESLDKLREILKTLRDLDRKSLEELEEIRR

SEQ ID NO: 25911 - protein, 58 aa, Artificial Sequence
  Synthetic
SREEKLREDLDRVFRKNEEELKRVEKEVKKLLDDSKRKLDEVKKELEDLLEKIKRLLD

SEQ ID NO: 25912 - protein, 60 aa, Artificial Sequence
  Synthetic
DEELLRALKEVVRKVIEIVRRLLELHRETVKELARVIKEILRLHLESIKKLLDVVREVLR

SEQ ID NO: 25913 - protein, 59 aa, Artificial Sequence
  Synthetic
DEEEKVRRLKELLDRTLKKLKELVEEHDKILDELLKKLEELVRRHNKLLDDLLRRVEER

SEQ ID NO: 25914 - protein, 55 aa, Artificial Sequence
  Synthetic
EELEDTVRKLLETSKKLLDEAREVLERLHRRSEELLRRVEETLRRLEDEVRKITK

SEQ ID NO: 25915 - protein, 59 aa, Artificial Sequence
  Synthetic
DKEDKLRKIKELIRKLLETIKRLVEEHDKELDETLKKLEDLVREHDRLLDETLKRLEER

SEQ ID NO: 25916 - protein, 55 aa, Artificial Sequence
  Synthetic
EELERDLERLEKTSEDLLRRVKEEIDRLHERSKKLLDEARKKLEELLKTVKDIAK

SEQ ID NO: 25917 - protein, 60 aa, Artificial Sequence
  Synthetic
SEREELARDLDDLRRRLREAAEELKKKHEKLRRELEELAKELRKRHEELKKELDDAARRG

SEQ ID NO: 25918 - protein, 56 aa, Artificial Sequence
  Synthetic
EEVLKRILDKLMKVSEDVLRKLEDLLREVIELTKKVLDLLDELLKRVKKVLEEVMK

SEQ ID NO: 25919 - protein, 60 aa, Artificial Sequence
  Synthetic
DREKKVRDIEEDLKRVLDKLRRRVETSKEELKKVLKRDKENADELEKTLRDVVRELDRKI

SEQ ID NO: 25920 - protein, 56 aa, Artificial Sequence
  Synthetic
SEVAKELDEVIKRLLDNLKENTDRLKEVIDRNLKDLRDLAEELRRVIERLLEDARR

SEQ ID NO: 25921 - protein, 58 aa, Artificial Sequence
  Synthetic
DKEEVLKDIKRKLDDHRRRTDEIVERLERLLKEHEEKTRRLLEDVRKKLEELKEIIKR

SEQ ID NO: 25922 - protein, 56 aa, Artificial Sequence
  Synthetic
EEVLKRILDRIEELLRRLVKVNTDSLRELKRVVDELVKVDRESLRELERVLRELTK

SEQ ID NO: 25923 - protein, 60 aa, Artificial Sequence
  Synthetic
SKEEEIVRELEKILRDHLRKVERIVEDLEKLLDDHLKKIEELAKRLEEIIREAARKLEEK

SEQ ID NO: 25924 - protein, 59 aa, Artificial Sequence
  Synthetic
EEVKELLKRVEKLIDDVRKKVEDLHRELEKALRDIDRKVKRLNEELERLVEEVEEKVKT

SEQ ID NO: 25925 - protein, 57 aa, Artificial Sequence
  Synthetic
SESEELRRKLEELEKELRDVLTKDRKMLEDLKRRLDKLVKDSERRIRELKRRLDEKI

SEQ ID NO: 25926 - protein, 55 aa, Artificial Sequence
  Synthetic
REIVEELRKVIEDHERLVREILELLRKAIDDNHKLVRDLLERLKRALDETREDRR

SEQ ID NO: 25927 - protein, 58 aa, Artificial Sequence
  Synthetic
RETEETLKKLEKLLRKMLEVSKRLNEEDEKLLRTKRKLIEDLLRRVEELLEETRRVVS

SEQ ID NO: 25928 - protein, 56 aa, Artificial Sequence
  Synthetic
KDLVETLKRKLDKLLRDIRELAKDYKRKLDRLLEDVERLHRELKKELDELLKEVKD

SEQ ID NO: 25929 - protein, 59 aa, Artificial Sequence
  Synthetic
SELEKLLTDLERVIRKVVEDLRRLLEEHKKALDEDKKRDEDSNEELADAIRKVIEKLKR

SEQ ID NO: 25930 - protein, 56 aa, Artificial Sequence
  Synthetic
EEDTKRLLEKIHDDHRKLVEENERLLREDHKTLEDLIRKIKKLAEEILELTARETK

SEQ ID NO: 25931 - protein, 62 aa, Artificial Sequence
  Synthetic
DEREVLKEILDLVRRLLELALEILKRSLELLRRLAEEAKKVLDRSVELLRRLVREAKEAAKN

SEQ ID NO: 25932 - protein, 56 aa, Artificial Sequence
  Synthetic
DELVKEVEDRLRESEKKLERLLEDVERLLRENEERLRRLLEEVERLLRELAETLER

SEQ ID NO: 25933 - protein, 56 aa, Artificial Sequence
  Synthetic
SEKEEVEKRLKKVDEDTKRAVEEVKKAIEEVLRRHEEASKRVEEAIRRVLKELEDL

SEQ ID NO: 25934 - protein, 57 aa, Artificial Sequence
  Synthetic
REELLERLKELIKRLLEALKRLDEEVSKLIDELLKRLEKLAKEVLDLNRELLERTRR

SEQ ID NO: 25935 - protein, 60 aa, Artificial Sequence
  Synthetic
SDEERLDKVLKEAEDIIRELERLLRESLETLKRLIERLEKLLRDSLEELRRLIEDLARKR

SEQ ID NO: 25936 - protein, 59 aa, Artificial Sequence
  Synthetic
EDVVRMLKEVSRRDEELTRRLLRMAKKLLEDNEELSRRLVKKLDEVLKRVEEIIKRETD

SEQ ID NO: 25937 - protein, 60 aa, Artificial Sequence
  Synthetic
SREERIRKLAEDLKRKIEELLRRVRKLAEEHKRLIEKILEESERLAEELKRRAEELKKRL

SEQ ID NO: 25938 - protein, 59 aa, Artificial Sequence
  Synthetic
KEVLDELRRLLELLKKLVDRLLELNKRLNDHAKKLVEDLLRLLKKLLEEIKKLVDDARR

SEQ ID NO: 25939 - protein, 61 aa, Artificial Sequence
  Synthetic
SEEERLEEEVRRELERYRRTVRRLAEEVKEELERYEREVKKEEEKLEKTLEDLERELTRDG

SEQ ID NO: 25940 - protein, 57 aa, Artificial Sequence
  Synthetic
KKTIAEELKRVLRELTRILRELVKLNSDVVRRLLEVLTRLAKLSEDVVREILEIERE

SEQ ID NO: 25941 - protein, 59 aa, Artificial Sequence
  Synthetic
SEEEKLETVREELRRALERIEELITKNEKKIEDTLRDIRREIEENARTVKEALERIKKD

SEQ ID NO: 25942 - protein, 59 aa, Artificial Sequence
  Synthetic
KEKVDRTKEELERLKKEHRERVEETKRKLDELKKEHEREIRKTETDLRRLLKELADRAK

SEQ ID NO: 25943 - protein, 59 aa, Artificial Sequence
  Synthetic
SEDEKLRKLVEEVERTLKKLIDYLRENVEDVDRILRRLKELIDRHLKKVRELIEKLLRG

SEQ ID NO: 25944 - protein, 59 aa, Artificial Sequence
  Synthetic
KDTVREIEKDLEDSKRELERIKEEIEELLKRLEDKNERAIEEIEEDLKRLEERLREAAK

SEQ ID NO: 25945 - protein, 59 aa, Artificial Sequence
  Synthetic
SEEEKLRKTEEDLKRTLEELKKILDDHLRIIERLLREIKRVLEENKRNARRLLEEIKRS

SEQ ID NO: 25946 - protein, 59 aa, Artificial Sequence
  Synthetic
ERVLKRLEKELRDHLKRLEEIIKRLEEDLKKTLDELKRTIEDAERKLRDLERKVKEDAK

SEQ ID NO: 25947 - protein, 59 aa, Artificial Sequence
  Synthetic
SILERLVRELIRLLRELLRIHKELVERVIRVLERLLEVHKKLVETIERLLDKLAELVRR

SEQ ID NO: 25948 - protein, 56 aa, Artificial Sequence
  Synthetic
KREIEKVLREIKEELRRSLRELKRVLDEVKERLKESLERLRKLIEEIKERLDRIRK

SEQ ID NO: 25949 - protein, 59 aa, Artificial Sequence
  Synthetic
SLEEITKRLLELVEENLRRHEEILRELLELAKRLAKEDRDILEEVLKLIEELLKLLEDN

SEQ ID NO: 25950 - protein, 60 aa, Artificial Sequence
  Synthetic
ERTLREVVRKVLEEAKRLLDELEEVHKRVKKELEDIIEENRRVVKRVRDELREIKRELDE

SEQ ID NO: 25951 - protein, 60 aa, Artificial Sequence
  Synthetic
SKIEEVLERAKEVLDRLLDLHRRLVKEIEDVLDRSNELLDRLLKELEKVLDELLDIVRRR

SEQ ID NO: 25952 - protein, 59 aa, Artificial Sequence
  Synthetic
EEALKELKERIEEIKKTLRELLKELKKLNREIKETIKELSERLARAVEKIKRELEKLRK

SEQ ID NO: 25953 - protein, 60 aa, Artificial Sequence
  Synthetic
KAEEAVEKLVRIARAIVKINEDLSREVVRILREIVRLNEETTRLLVEIAREVVKVVEDAG

SEQ ID NO: 25954 - protein, 59 aa, Artificial Sequence
  Synthetic
EELLRRLEELRKRLEKVLDDSRKELEKLKRELERLLEESRRKLEKLKRDLERVLEETRR

SEQ ID NO: 25955 - protein, 59 aa, Artificial Sequence
  Synthetic
DDRRILKLLIDIIRKLVKLNEETADKLIRVIDELLKMAEESLKKVIDLVRTLVEIIRRE

SEQ ID NO: 25956 - protein, 56 aa, Artificial Sequence
  Synthetic
RKVVEELLRKVEKLIKDIRERYERLVKKVRDLVERWKELVRRLLKKAEDVIREIEK

SEQ ID NO: 25957 - protein, 58 aa, Artificial Sequence
  Synthetic
DEEDALRTIEELVKRVNEENKKILDESEDLVRRLNEKNERINKESRDLVKKLREDAED

SEQ ID NO: 25958 - protein, 55 aa, Artificial Sequence
  Synthetic
ERVLKLVEDAAREDERLNRELDRATREVAEEDKKLNEDIDKTLNDVIRELLEAAR

SEQ ID NO: 25959 - protein, 58 aa, Artificial Sequence
  Synthetic
SSVETIKKLVEDARKKLEDSIRKIEKLVRDVEKTLRDSLKRIRDLVEKVVRTLRELLR

SEQ ID NO: 25960 - protein, 57 aa, Artificial Sequence
  Synthetic
LEELVKRITDILREHVKMHEDLIRAIAKVLRDHVEAHKRLIKRITEILEEVVKAVTD

SEQ ID NO: 25961 - protein, 59 aa, Artificial Sequence
  Synthetic
DTKEEIKKLVEELLRLIEELIKRTEELNKEDNEIAERVVETHSRILRDLLRSLEEVART

SEQ ID NO: 25962 - protein, 59 aa, Artificial Sequence
  Synthetic
DDELREVLDRIRERVKRSEDKLREVLERLKRDSKRIHKDLRKALEEAKKDVDEIRKETE

SEQ ID NO: 25963 - protein, 56 aa, Artificial Sequence
  Synthetic
RREEELKRIIREIERILEELRRRSREIEEKLKKVLEEHERVSRRIKERVEDLKRKV

SEQ ID NO: 25964 - protein, 56 aa, Artificial Sequence
  Synthetic
EKDIERIVEEALKLHEDVHDENRRILEEAIRTHREVIKRLEEIVKEAIKLIEDVTR

SEQ ID NO: 25965 - protein, 56 aa, Artificial Sequence
  Synthetic
SEKELLEEIEKRAEEVLREHDKRSEEIKRELERVLKELRDLSRKIEEDLERLVREV

SEQ ID NO: 25966 - protein, 56 aa, Artificial Sequence
  Synthetic
KKDIERIVRELIKVHRDVLRKLEKVVREALELHDRVNKELREVVERALRLLREVTR

SEQ ID NO: 25967 - protein, 58 aa, Artificial Sequence
  Synthetic
SEEEILKKIEDRLRAITEKHERMLREIKKELKKVMDEHEDLLRKIEKELRDVLERLRR

SEQ ID NO: 25968 - protein, 56 aa, Artificial Sequence
  Synthetic
ATLLERIVERARRELTKNHDKLRKILERLERILRELNEDLRRILTTAVDILRKLRK

SEQ ID NO: 25969 - protein, 60 aa, Artificial Sequence
  Synthetic
REDEVLRDIERLLREIEEKIRRILEESTRELRKVEEEVKRIIERTKRELKKIKEDVERKG

SEQ ID NO: 25970 - protein, 56 aa, Artificial Sequence
  Synthetic
RDLLEKIKRVIREHIKALEKLARDLKEILRRHIEALKELARDLAEVIRKLLEDVKR

SEQ ID NO: 25971 - protein, 59 aa, Artificial Sequence
  Synthetic
DLERLVELLKRIDDEAVKLVRKLVEVLKRIDEELVRLVEELLRALRRINEEVVRLVKRV

SEQ ID NO: 25972 - protein, 56 aa, Artificial Sequence
  Synthetic
EELLKRLRRIVEESKRRVDELLKELRKISEDVAREVERLLRELERISREVKRRVEE

SEQ ID NO: 25973 - protein, 59 aa, Artificial Sequence
  Synthetic
SDEEVARELSDIVRKLVERNKESIEDAMRIVKELVDRNKKVTEDVLRLLEKLLEDVRDT

SEQ ID NO: 25974 - protein, 56 aa, Artificial Sequence
  Synthetic
EEFLRRLKEEVRKIVEKVKRDLERSLKELERILEEVKRMLERSLRELERVLKEIKD

SEQ ID NO: 25975 - protein, 56 aa, Artificial Sequence
  Synthetic
SKEEILRELEELSRRLVEKLKDLLRKLEKLSDEVVKELRKSLEELKDLADKMVKKL

SEQ ID NO: 25976 - protein, 55 aa, Artificial Sequence
  Synthetic
RLLEEIVKLLRDVAKRNLDLLEKHRELLERALEEVKRLLDEHLKLLRDALRRLKK

SEQ ID NO: 25977 - protein, 58 aa, Artificial Sequence
  Synthetic
SREDLLRKLKELIETILRKSSELLDRLLKLVREHSETSERLIRELKKILEDILKLIKG

SEQ ID NO: 25978 - protein, 56 aa, Artificial Sequence
  Synthetic
EKELRRIKEAVERVLRDHKRKNDKILRDVEEVLRRHLEELRRILKDVKKVLDEARK

SEQ ID NO: 25979 - protein, 58 aa, Artificial Sequence
  Synthetic
DDEELLKRLEDLDERLLRFSKENLEELRRRTRELIETSETLLERLREIIETILKVIRD

SEQ ID NO: 25980 - protein, 56 aa, Artificial Sequence
  Synthetic
ERFLEEIAERVERILKEHRELLKRIEDEVRRVLTEHKKKLEKLKREVERVAEETKT

SEQ ID NO: 25981 - protein, 57 aa, Artificial Sequence
  Synthetic
KETDEVVKRAKELVDTLLKVIKEHVERLKRLVEELLKVIRDHVRILRELAKRLREKV

SEQ ID NO: 25982 - protein, 59 aa, Artificial Sequence
  Synthetic
SDVERVLEELRRRLEKSVEEVERVLKRLKEELDKSVEEVKDVLRRLLEDLKRVVEELRR

SEQ ID NO: 25983 - protein, 59 aa, Artificial Sequence
  Synthetic
SEEERVLEEIKREIDRIVKRARELLEKYRELVERIKRRNEEILKKYEKLLEEIERLADA

SEQ ID NO: 25984 - protein, 56 aa, Artificial Sequence
  Synthetic
ERDLKRALRRHAEELTRLNKELNELLKEHEDELRRLLAELDRIVRKLLRTLKELTE

SEQ ID NO: 25985 - protein, 60 aa, Artificial Sequence
  Synthetic
SKEEEAKRVIDELREELRRILRENTELVKESERRITELLKENSDLVEEVRRRLEEVLEKE

SEQ ID NO: 25986 - protein, 55 aa, Artificial Sequence
  Synthetic
EDLKRLVDDVLRLAEESHRKIEELNRRTLKLMEDSHRKLKELVRKALELITELTR

SEQ ID NO: 25987 - protein, 59 aa, Artificial Sequence
  Synthetic
DSIERLAEELDKIVTDVLRVNEDSVRTWTRILEEVLRLNRELARILIDIARRVLELVKR

SEQ ID NO: 25988 - protein, 60 aa, Artificial Sequence
  Synthetic
EKELLDEVRRLLKRVKELLKRSIDLVEKILRDVKRLLDESIELVKRVLDKIRRLLEELAR

SEQ ID NO: 25989 - protein, 60 aa, Artificial Sequence
  Synthetic
SEEDEVLKTLDRKHKEAKKELDKVLRELEEEHKKVKRELDEVLKRLEDIHRRITELLRRG

SEQ ID NO: 25990 - protein, 56 aa, Artificial Sequence
  Synthetic
EEAVERVLKENKELIEEIVRLIRKILDENIELIRRIVRLLERLLRENLRLIEEARK

SEQ ID NO: 25991 - protein, 61 aa, Artificial Sequence
  Synthetic
SKEEDVRRLIEELVRELRRILEENRRMLKELVEKLEEVLRRSEEVWRRLAKELDELLKELN

SEQ ID NO: 25992 - protein, 59 aa, Artificial Sequence
  Synthetic
EEVIKKIEDLVRKTERELREVHKELRRLVEEAKEVVDRSVEILRDLVRKIVRILEESAR

SEQ ID NO: 25993 - protein, 58 aa, Artificial Sequence
  Synthetic
STEDELRKIKEELEDIRRRIEELDKKDNEDLDRIDEEIKRRLDKNIRDLDEIAKEVRK

SEQ ID NO: 25994 - protein, 60 aa, Artificial Sequence
  Synthetic
KEELAEITERLLKKYREVAEENMRSLKELLREYREVNTRTHKALERIIDRIREILEKVRK

SEQ ID NO: 25995 - protein, 59 aa, Artificial Sequence
  Synthetic
KEKEAIKEVAELLKRLIDDLLRLLKEDVDTARRVLDEIKKLLEENERIAREVLRRLRED

SEQ ID NO: 25996 - protein, 56 aa, Artificial Sequence
  Synthetic
ETDLDRIVKEMEKVLEDSIRELEKLVKRLEDILRESEKALRDLLRELRKVLEEVRT

SEQ ID NO: 25997 - protein, 56 aa, Artificial Sequence
  Synthetic
SSMETAVKLVKDLLREDIRSNEEHVRLAKKLLEEDIESNERLLRILKKLLDLVEKT

SEQ ID NO: 25998 - protein, 56 aa, Artificial Sequence
  Synthetic
REELRRVAEEIKRRAEELLRRTEELVRDILRRHEDALRRTEELVRRIEKRLRDATR

SEQ ID NO: 25999 - protein, 61 aa, Artificial Sequence
  Synthetic
RELEDVLRMIEELARRLVEILERHNKLSKRVIELLVRILEEHLKLVAELIKKAVEILRRIL

SEQ ID NO: 26000 - protein, 59 aa, Artificial Sequence
  Synthetic
DDIRKLLKELLDDVKKIIDDSRRLLDELRKELEKILKESEKLVDELREAVDRLIRKVRE

SEQ ID NO: 26001 - protein, 58 aa, Artificial Sequence
  Synthetic
SREELLKELRKLVEEIKRRSEELLRRLEKLLEDNERRTRELLERLKELLREIEERIRG

SEQ ID NO: 26002 - protein, 56 aa, Artificial Sequence
  Synthetic
RDIVRELTELVRRLLKRVEELLKRSLEILRELIKAIADAIKESLDILDRLLREVAR

SEQ ID NO: 26003 - protein, 59 aa, Artificial Sequence
  Synthetic
EEEEVLRRLRELIERLVRETEEKLKEIERRIEEVLERHRRALEELKKEIDEILEEAERR

SEQ ID NO: 26004 - protein, 60 aa, Artificial Sequence
  Synthetic
EEALRRLVEKVKRVLEEILKVSEEVLEKVKKVLTDILKRLKELVERNVRLLERILDEARR

SEQ ID NO: 26005 - protein, 57 aa, Artificial Sequence
  Synthetic
SKIEKLLRVIKKIIDKLEELLKRLLEVVRESIELLKRILDELLKVVERTADELRRIV

SEQ ID NO: 26006 - protein, 59 aa, Artificial Sequence
  Synthetic
KDLERLLRKVKEDNDRVKKEVERLLKEIEDRNRKVVEEIKRRLEEIKRELDKVVEEIRR

SEQ ID NO: 26007 - protein, 57 aa, Artificial Sequence; identical to SEQ ID NO: 26005
  Synthetic

SEQ ID NO: 26008 - protein, 59 aa, Artificial Sequence; identical to SEQ ID NO: 26006
  Synthetic

SEQ ID NO: 26009 - protein, 59 aa, Artificial Sequence
  Synthetic
KDEDKLRRIVAVLEDLIRLTEELAKILKRVTERLKELTEELKRRNEKVVEEILKLLRDS

SEQ ID NO: 26010 - protein, 56 aa, Artificial Sequence
  Synthetic
EEVVRRIRELATKNLDDNRKALEESRRIIEEIVKRIKDVIRTSREIIKELRKEIRT

SEQ ID NO: 26011 - protein, 56 aa, Artificial Sequence
  Synthetic
KEAEELVEVVRKHIKTLAEIWKKLVDALRKHVEILRRLLKELVEVIRRAIERVRRD

SEQ ID NO: 26012 - protein, 55 aa, Artificial Sequence
  Synthetic
ERLDTVLEELRRVLKELERKLRESIKELRDVLREVEERLKESIEELERVLDRLRR

SEQ ID NO: 26013 - protein, 57 aa, Artificial Sequence
  Synthetic
SEEEIAERVKDLIRRVLEEHERSVKKVEDLIERVLREHRRVLEEVRRLAEELERRLG

SEQ ID NO: 26014 - protein, 59 aa, Artificial Sequence
  Synthetic
DRRKDDLRRVLEELLKRLKELLEELKRINEELLKTLEKLARDNLEINKELIKRLDEETR

SEQ ID NO: 26015 - protein, 59 aa, Artificial Sequence
  Synthetic
SEEDVLRKLEEIVEELERSNRDAVRRLEEVVKRVEDLWEEVVRRLRELVREVEERLRDV

SEQ ID NO: 26016 - protein, 55 aa, Artificial Sequence
  Synthetic
KEIEEIIERVLRLLAELLKRVKRISEDLKRLLDELIEENADILRKLDELVTRDET

SEQ ID NO: 26017 - protein, 60 aa, Artificial Sequence
  Synthetic
DKERIIKRVLDELKEALKKAEKLHEDVLRELRRLLDEALKLHEDVLRELEELLRKIESTL

SEQ ID NO: 26018 - protein, 59 aa, Artificial Sequence
  Synthetic
REKVEELADEIRRVVKRIEERHDKLRKDIERLVRRIEELHKRLLEELEELVKRITEELK

SEQ ID NO: 26019 - protein, 57 aa, Artificial Sequence
  Synthetic
SVLETIVDIVRKLIELIEKLLRDLLELDKRNVDAVARNADKILKIAEDIVRTIASKG

SEQ ID NO: 26020 - protein, 55 aa, Artificial Sequence
  Synthetic
EDLKRELDRLIKEIEESNRRLKKTTKDLVDEVERILRKIKDDIEDVKRKIEEDKR

SEQ ID NO: 26021 - protein, 59 aa, Artificial Sequence
  Synthetic
SEDELLDRLDESVKEVLDRHRKLLEDLADTIRRVIKKVKDLLDEHKKTLEDVIEKVLRR

SEQ ID NO: 26022 - protein, 59 aa, Artificial Sequence
  Synthetic
ETVVRDLRRLLEELRRISEEIVRDLRRLLEELKKIVEDVVRESKKLLDDLRRIIDETVR

SEQ ID NO: 26023 - protein, 59 aa, Artificial Sequence
  Synthetic
SRAERLADEVRKAVKKSEEDNETLVREVEKAVRELKKNNKTWVDEVRKLMKRLVDLLRD

SEQ ID NO: 26024 - protein, 60 aa, Artificial Sequence
  Synthetic
SEELVRIAIEVLKRLLEIIEELVRLNNEILERLLKIVRELHKDNIKILEDLLRIIEEVLR

SEQ ID NO: 26025 - protein, 57 aa, Artificial Sequence
  Synthetic
SEVETLIRLIEENLRLLKEVADLSLEVIERLLRILKEIVKRSLDVIRRLLKLIEEVL

SEQ ID NO: 26026 - protein, 55 aa, Artificial Sequence
  Synthetic
ERAKKRLEDLLREHREILKEVVKRLKELLDRHRKLLDEARRESKRVLDEIDEKTK

SEQ ID NO: 26027 - protein, 57 aa, Artificial Sequence
  Synthetic
SRVETLIRVVEKNLELLREIVERSLRVIKKNLRLLEEVARLSLKVIKELLEEIKRRV

SEQ ID NO: 26028 - protein, 55 aa, Artificial Sequence
  Synthetic
RRVKEELKRLLEKHRELLKEAVKRSEDVLKEHKEVLDDVRRESEKVLEELRRAET

SEQ ID NO: 26029 - protein, 61 aa, Artificial Sequence
  Synthetic
SEKDEVTRRIRELLKEAEETNREAIERIKRLLDRVREKVEEVAKRSEELLRRLKKVLDRDL

SEQ ID NO: 26030 - protein, 57 aa, Artificial Sequence
  Synthetic
KEDLLREIARILRESLRLIRELLKEIEKIVKEIIELLERLNDELRKIIEKILETTKK

SEQ ID NO: 26031 - protein, 59 aa, Artificial Sequence
  Synthetic
SRKELLKKLREVLETNLKLIEDLVRDIERALEEDRKLIEDLLRRIEEVARRILELRERG

SEQ ID NO: 26032 - protein, 56 aa, Artificial Sequence
  Synthetic
DKRLREVIKRLIEELRRLLKEYEDVLRKVREDLKKLLEEYKRVLERVDEELRKRDK

SEQ ID NO: 26033 - protein, 59 aa, Artificial Sequence
  Synthetic
DEEKRVEDVLRRVEDLLRKLEEEHRRIVKRIRDELRESERKIEELVDRLRKEIDRIRKT

SEQ ID NO: 26034 - protein, 57 aa, Artificial Sequence
  Synthetic
KEDLLRRTEKVEREIRKTLDDLHERTRRVVEETLRKNEELLKEIKRVVETILDEIRK

SEQ ID NO: 26035 - protein, 57 aa, Artificial Sequence
  Synthetic
SKKETLVKLAEEIIADIHRVNRESLELIKRLIERVEKLTKESLDSIRKLIERILRDI

SEQ ID NO: 26036 - protein, 55 aa, Artificial Sequence
  Synthetic
DEVREIKEKVRELIDKDRRLVKEIEDLAREILDTDRKLVKRLEEVVRELIERARR

SEQ ID NO: 26037 - protein, 59 aa, Artificial Sequence
  Synthetic
DEERVLTEIEKLVKRLKDRNDEIRRELEKTSKRLEEELERIERELDRLVEELKKELERT

SEQ ID NO: 26038 - protein, 56 aa, Artificial Sequence
  Synthetic
DKDLEDLIRRVLTRVKELARRLDRKNKELLKEIERLIREDKETADRVKTEIKKKTD

SEQ ID NO: 26039 - protein, 62 aa, Artificial Sequence
  Synthetic
DEEELVRRVEKLARDIEETLERLVKELERLYREIEKELKRLVKELEDANRRIVKRLKDLFDK

SEQ ID NO: 26040 - protein, 60 aa, Artificial Sequence
  Synthetic
DEEVLRRIEKLNKELEDVLREVEERIRKLLRELEEVSRRVTERIKRLEDELRKAFEEVTR

SEQ ID NO: 26041 - protein, 64 aa, Artificial Sequence
  Synthetic
SKKEDAIRKARKLLERIRRLADKAIKRSRRLLERVRELVKESLDILRKLLERLRDLVRKIKKDG

SEQ ID NO: 26042 - protein, 55 aa, Artificial Sequence
  Synthetic
DELRRLTEEILKLHEESVKKLEDLTKEALEASEDVHRKLEKLTEEILRRTEEAEK

SEQ ID NO: 26043 - protein, 59 aa, Artificial Sequence
  Synthetic
KEKEEADRELRELKREMEDILREVEKELRELLKKSEELLEEIERLSKELTDEAREVERN

SEQ ID NO: 26044 - protein, 56 aa, Artificial Sequence
  Synthetic
RELARKLLKRLKELNDRILETLRRLNEETARLVKEVLDTARRLLEELIRVLDETRT

SEQ ID NO: 26045 - protein, 64 aa, Artificial Sequence
  Synthetic
SKEDRLREILTELKEVIDTILRKLEEDARRLKKAHEESNEKLKRIVEDLERVLRELLRKLKERV

SEQ ID NO: 26046 - protein, 56 aa, Artificial Sequence
  Synthetic
KELLDKAKEIVDRVTEEVERILEENERLWRESIKDVKRILDEAREIVRRLLEEVRK

SEQ ID NO: 26047 - protein, 56 aa, Artificial Sequence
  Synthetic
DESEKVKEILERIERSLREVKRRVDEVLKRIKELLEELKRRHDESVKELKRILEEI

SEQ ID NO: 26048 - protein, 60 aa, Artificial Sequence
  Synthetic
GEELAKTLEKLAKELLDANRRLVDTSVKLVKRLLEIVAELVERHKESNRRLLKLIEDRDR

SEQ ID NO: 26049 - protein, 56 aa, Artificial Sequence
  Synthetic
SEEDILRRVVEELERLIKEAKEIIEEIRRLHEELDRKSEELLDRLLELLRDLLRRL

SEQ ID NO: 26050 - protein, 59 aa, Artificial Sequence
  Synthetic
KDKVRRLDELVKELLERLRRLHEENTEEVERVLRESARLLDDLLRKVEEVVEKIKEELR

SEQ ID NO: 26051 - protein, 56 aa, Artificial Sequence
  Synthetic
SREELVKDILRLLTESNDEHKKLSDKLVDLVRKLIELAEKLTEEVVDLVRRLLEEL

SEQ ID NO: 26052 - protein, 59 aa, Artificial Sequence
  Synthetic
EDAKELLKKVKEIVDELVRRHKKLVDEVREVVERVVREHRELVKKDRRLVDEVLKRLRT

SEQ ID NO: 26053 - protein, 56 aa, Artificial Sequence
  Synthetic
SREDLTRETERLLRESNEKHKELTKEIIRLVDRLIKLLEELTERLKELVKELLKRL

SEQ ID NO: 26054 - protein, 59 aa, Artificial Sequence
  Synthetic
EDAKKLVKEVRDVVERVRREHDKLVKEIEKIVRDIEKKLRDLVREDRELVKKIEKKLRD

SEQ ID NO: 26055 - protein, 59 aa, Artificial Sequence
  Synthetic
SAEDLVRRVKDLVDKLEDKLRKVVRTNERLWEEIRKRLEELVRRNKELWDRLVEKLKAG

SEQ ID NO: 26056 - protein, 56 aa, Artificial Sequence
  Synthetic
IRVLVELVRRHNKVLKELVEELEKLVRDHNRVVEEVVRELVELLRRAVEVIKEVVK

SEQ ID NO: 26057 - protein, 62 aa, Artificial Sequence
  Synthetic
REKEVIDDVRRMLEDLLRTIRRVIEENKRIVKESSDHIREVLKRVLEVLRRLLEEVKRLTER

SEQ ID NO: 26058 - protein, 60 aa, Artificial Sequence
  Synthetic
RKDVERELEKIIREVEERLRRVKEKLDDIDRRAKELHEEVMKRLEELVERIRRLLEDVER

SEQ ID NO: 26059 - protein, 62 aa, Artificial Sequence
  Synthetic
SDEEILREILKTLEDVVRRLEELLKENEKLIRESTKLIKDVLDELLEIIKRVAKLIRDLKRN

SEQ ID NO: 26060 - protein, 60 aa, Artificial Sequence
  Synthetic
EETVERKLKKLLDKARTELEKIKRRLDKLNEDYERKLRELEKRLRDLLERLRKTLEDIRK

SEQ ID NO: 26061 - protein, 60 aa, Artificial Sequence
  Synthetic
SEIEKILEELKRLVERVLKLNEDIARRIAELVKKDLKLIEDLLRELEDLVRKILDALRKK

SEQ ID NO: 26062 - protein, 56 aa, Artificial Sequence
  Synthetic
KDKVVEEIRRLLKRLKEEAEKVARESEELLRRIREASKELAERAKDLLRKLDEAVR

SEQ ID NO: 26063 - protein, 62 aa, Artificial Sequence
  Synthetic
SDEERILDTLRRIIEDLLRLLREALRRHEELLRRNIELIRRVLETIKEVLRRLLKLLLEVAK

SEQ ID NO: 26064 - protein, 60 aa, Artificial Sequence
  Synthetic
REELDRLLEDVRRVIEELKKLVREVLERSERMVKEVRDLWRDLKRRIEEAAERIKDELRR

SEQ ID NO: 26065 - protein, 61 aa, Artificial Sequence
  Synthetic
SERELLEKVRKVAEENIRILEEVLRKIAEVVKEDLKLLKELLEATERVVEELLKRIVEKKK

SEQ ID NO: 26066 - protein, 55 aa, Artificial Sequence
  Synthetic
ETLERLLEELERLVKEVVERSERLLKKLLEDVRRVAEELVKSVEDLLKDIEREVT

SEQ ID NO: 26067 - protein, 59 aa, Artificial Sequence
  Synthetic
REKELVDDIRRILEEILRLLRRLLEEVIRLLEENEKLVRRHLKTVIDILRRVAKLLDEN

SEQ ID NO: 26068 - protein, 56 aa, Artificial Sequence
  Synthetic
DSLVREVEELIKRLEKHIDDLLKTSRDLVKRVLDLVDEVVKRVEDLVERVKEKIDT

SEQ ID NO: 26069 - protein, 62 aa, Artificial Sequence
  Synthetic
DEERLAEELERVLDRNRKLLEEALRELRRVIEENRKSVKRLLDELKRVLDELLKVLRELSRD

SEQ ID NO: 26070 - protein, 56 aa, Artificial Sequence
  Synthetic
EEDVERAVKEIRDRLRKLLEDYERAVRRLEDKLRRVRERYEKVLKRIKDKLEETKR

SEQ ID NO: 26071 - protein, 62 aa, Artificial Sequence
  Synthetic
SREEVLRELEEVIEDNRRLLEELIEKSKKVLDESLKLIDELLRRLEEVLERVLRLLEELSKL

SEQ ID NO: 26072 - protein, 56 aa, Artificial Sequence
  Synthetic
EDDLKRVVDEVEKKLRELKRRYKEALERIKEKIKELKDRYERAVREVVAELRKTTK

SEQ ID NO: 26073 - protein, 56 aa, Artificial Sequence
  Synthetic
KKDEEIREKLDRLLEENRRALEEITTRLDDLLRRNKDALRKVMEKLKRLLDDLRRA

SEQ ID NO: 26074 - protein, 55 aa, Artificial Sequence
  Synthetic
ERVKEILERILRVVEEAVRLNEESLRRILDVVRKAVKLDRESLKKILDVVEEAVR

SEQ ID NO: 26075 - protein, 61 aa, Artificial Sequence
  Synthetic
SRVEELKKLIEDILRISREVVERIKRVAEDIHRINRRVLDDLRKLIEDILRTVEEILARKV

SEQ ID NO: 26076 - protein, 55 aa, Artificial Sequence
  Synthetic
DEVEREIRRVKEDLDRILEEYRRLLEEIKRKLEEILRRVEELHRRLRRKLEEIDR

SEQ ID NO: 26077 - protein, 60 aa, Artificial Sequence
  Synthetic
SRVEKVLELLKRIIEILRELVKVHLDVLRHNDELLKRIVEDLKRLVKKLVDILKEIVEKR

SEQ ID NO: 26078 - protein, 55 aa, Artificial Sequence
  Synthetic
EEALERLKRLLEEIRERLEELKKRLEESLKRHEEEVRKLLDKLRRLLRRAEEEAR

SEQ ID NO: 26079 - protein, 58 aa, Artificial Sequence
  Synthetic
SKEDELRKVLETLERLARELEELNKKILDDLKKLIEELRRHTEEVMRRLKELADELRK

SEQ ID NO: 26080 - protein, 54 aa, Artificial Sequence
  Synthetic
EVVRVLEELLRLVRDNVRRLDEILKELLRLVEESVRTAEEILKELLRLIKELAR

SEQ ID NO: 26081 - protein, 59 aa, Artificial Sequence
  Synthetic
SIEELVDELLKVLKEVVEETAKLLEENNRRLKKITDDVRRLNEDTIRRLREVVKELETK

SEQ ID NO: 26082 - protein, 56 aa, Artificial Sequence
  Synthetic
DDKARKALEDLERELRDVDRRSDEEATRLHEEHKKALDRYVKELKRVLDKMKEDTR

SEQ ID NO: 26083 - protein, 59 aa, Artificial Sequence
  Synthetic
SEKELVDKLIKLLEDVVKKLEDIARDNNRILKEIADRVKELNERTVEEIKRVIEELRRK

SEQ ID NO: 26084 - protein, 56 aa, Artificial Sequence
  Synthetic
EEKLTRAAEDLLRKLRRVDEESDKKLREVHRKHKEALEEVKRRLKEITEEADRATR

SEQ ID NO: 26085 - protein, 62 aa, Artificial Sequence
  Synthetic
SESELIRELEKLVKEIVDELERLLRNNIRLLEEVAKTLIRLLENNIELLDEILRELERLSKE

SEQ ID NO: 26086 - protein, 56 aa, Artificial Sequence
  Synthetic
EEEVRRTIERLKEEHEDALRRLKEILEELKDEHRRVLKRVKDKLRELKRRLEEREK

SEQ ID NO: 26087 - protein, 57 aa, Artificial Sequence
  Synthetic
SEREELERLLKELEDVTREVVERLKKLLRDNEKLTDEVRKRLRDLLRRLEEMVRRRG

SEQ ID NO: 26088 - protein, 56 aa, Artificial Sequence
  Synthetic
EEEIEEIVKRLVEVLEKVLRELERASRKLVKVVEEVLRALEEISKELVDVVREVLR

SEQ ID NO: 26089 - protein, 60 aa, Artificial Sequence
  Synthetic
DEDRRLEDAVRKLRKEHKDIMKKLDDIMRELDEDHRRIKERLDRILEELKKLLTRVLRET

SEQ ID NO: 26090 - protein, 54 aa, Artificial Sequence
  Synthetic
EIERIIRRVIEVIREILDLVRKVNKKALRVIEEILEDLARVNKKAVDAIDELRK

SEQ ID NO: 26091 - protein, 58 aa, Artificial Sequence
  Synthetic
DEERLLKTILDVIRKVLKESKDILRRVEEILRRVIETAKEIHKEVKEIIEDVLRLLRE

SEQ ID NO: 26092 - protein, 60 aa, Artificial Sequence
  Synthetic
EEEIEKRVREIKKEVEDLLRRSEELLKELLDRIRKLLEELKKRHEDLLREVKKDLDEIRR

SEQ ID NO: 26093 - protein, 61 aa, Artificial Sequence
  Synthetic
DEVEELLKRVRELLKRSEELVRKILEDVKRLLERSIEEVEDLLRKVEELLKRLLDLVERRK

SEQ ID NO: 26094 - protein, 56 aa, Artificial Sequence
  Synthetic
EDLDRDVDRVLKEIMDLLRDLVRRTKELLEELLRLLEELVRRHKELVRKILDEIRK

SEQ ID NO: 26095 - protein, 59 aa, Artificial Sequence
  Synthetic
REAEELLRELEELLKKSEKVLEDLLRKNRELIKDSKRRLDEVRRKVEKLAEEVEEVIRR

SEQ ID NO: 26096 - protein, 56 aa, Artificial Sequence
  Synthetic
KDAVRKLIEELKKLLEDLVEHHERLLKEDHERLKRLLDHHRELLKTVLTILRETAK

SEQ ID NO: 26097 - protein, 59 aa, Artificial Sequence
  Synthetic
ELDEILRKVVEDSRRLVKELEDILREVIERTERILEEHRDLTRKADEDIRRILEEATRT

SEQ ID NO: 26098 - protein, 57 aa, Artificial Sequence
  Synthetic
KEEVLKDIVRVLRDVLKKANDLLKTHLDLNRESVKKVVEIARRHVKMNEDSVRKVEK

SEQ ID NO: 26099 - protein, 59 aa, Artificial Sequence
  Synthetic
DVEDVLREVVERSRRLVEEHKRISEKVIRDTKRILDEHRELTERVIRRAKKLVDDARRT

SEQ ID NO: 26100 - protein, 57 aa, Artificial Sequence
  Synthetic
KEEVLKDAVRVLEEILRKLNELLERHLKLNEESLERMNRILTRHVKLNKESADDARR

SEQ ID NO: 26101 - protein, 59 aa, Artificial Sequence
  Synthetic
DEEELLRRVTEELKRLLDEARKLHEDVKRELEKLLKENDDLLRDVKRKLERLLEALKRG

SEQ ID NO: 26102 - protein, 57 aa, Artificial Sequence
  Synthetic
KDKLLERIRRLLETLLEVLKRDNEEIKRILEELLRVAEENLRRIKEIIDRLLDATRR

SEQ ID NO: 26103 - protein, 59 aa, Artificial Sequence
  Synthetic
DEEEVVKRLADVLRENDETIRKVVEDLVRIAEENDRLWKKLVEDIAEILRRIVELLRRG

SEQ ID NO: 26104 - protein, 59 aa, Artificial Sequence
  Synthetic
EDVKRALEELVKRLRKLLEDVKKKSEDIVREVERIVRELKKRSDEILKKLEDIVEKLRE

SEQ ID NO: 26105 - protein, 56 aa, Artificial Sequence
  Synthetic
KEREEIRERVKRILETSRKLLEELAKAVEDVLRRSKELIDELRDAVRRVLEELERG

SEQ ID NO: 26106 - protein, 59 aa, Artificial Sequence
  Synthetic
DRTKKIVERIIELIEELLRLLVKVVEDSVRLIEELLKLAEEVAKRSLKLIEDLLRAIEK

SEQ ID NO: 26107 - protein, 58 aa, Artificial Sequence
  Synthetic
SDDEVIEKVKEDLRRLIKEAEDVVREYEKRLREVEKKLDEVVKESERLLRELLKKLEA

SEQ ID NO: 26108 - protein, 60 aa, Artificial Sequence
  Synthetic
KKELIKILRDLARKHRELLKRLKELTREHLKRVREILEELLRVTRELVEEIDKILKDLKK

SEQ ID NO: 26109 - protein, 58 aa, Artificial Sequence
  Synthetic
SEDEVLERIRRALERVEDEHRKVLEKIVEDLKDVLEKHKRVLEEAKRDLERIKEDADK

SEQ ID NO: 26110 - protein, 60 aa, Artificial Sequence
  Synthetic
EKSLKDLLREVLERSKKLLEEHHKHLEEIVRRTKELLERHHRHLKEIIRRIEEILKRERD

SEQ ID NO: 26111 - protein, 59 aa, Artificial Sequence
  Synthetic
SKEDELREVLERVKRLIETVKRALDEALDRTRRLIEELDKTSKRVLTTVKKLIEDARRE

SEQ ID NO: 26112 - protein, 57 aa, Artificial Sequence
  Synthetic
ERDLLRELLRIVKEHVDEVRKLLDELRKVNEKIVDAVRKILEKLLKIATDAIEETRK

SEQ ID NO: 26113 - protein, 61 aa, Artificial Sequence
  Synthetic
SEKERLMEEIKRVAEELRKTVDRLRERNEKVVRDIRETVREVEREHEDVVKELADRVRELR

SEQ ID NO: 26114 - protein, 62 aa, Artificial Sequence
  Synthetic
EEVREVLRRLTKILRDLLKRNKEIMEKLLRDLKELLKENKKALEDLLRKLEELLRRIAEAEK

SEQ ID NO: 26115 - protein, 57 aa, Artificial Sequence
  Synthetic
SKEETTKRLLDRHLERDRELLDRAARTNEEILRRNREVLKELFELLKRILDRVREAN

SEQ ID NO: 26116 - protein, 59 aa, Artificial Sequence
  Synthetic
EEVLRELRELLKRLKKRLEELLREHEKLLEDYKDRLRKSDDDLRRSVEEIKKALDRLRK

SEQ ID NO: 26117 - protein, 57 aa, Artificial Sequence
  Synthetic
SKLEDSAEKLKEHLKRDRELLKRAEDLLREILRRNREVLDELRRTLDDILRRIREEN

SEQ ID NO: 26118 - protein, 59 aa, Artificial Sequence
  Synthetic
KEVLDRLEKLLRDARKRLKELLDEHEKVLEDMERRLRESLDDLRRSLDRIRKDLKRKTD

SEQ ID NO: 26119 - protein, 62 aa, Artificial Sequence
  Synthetic
SEKERTKELLERLLKLIRELLKKLEDLNRDLLRRVKEVLDRLAELNEELLRRVEEVTRLRDE

SEQ ID NO: 26120 - protein, 60 aa, Artificial Sequence
  Synthetic
KEKLTKLIKEIKERSKRLLEEVKRALEEVMKKNEKILRDVRDDLRRAREELREILREADD

SEQ ID NO: 26121 - protein, 60 aa, Artificial Sequence
  Synthetic
REEEKLKETLERILRELEKLAKENKELLERILKRDEDLTRENKETLDRLLKRVEEVTRRK

SEQ ID NO: 26122 - protein, 60 aa, Artificial Sequence
  Synthetic
DREVEKVLRDIKRKIKEIVDEHRDMNRKIKEEIDRIDTEYKKSLKDIKKEIEEVLDEARQ

SEQ ID NO: 26123 - protein, 59 aa, Artificial Sequence
  Synthetic
RKEEAIERIRREIEKVRRRLREVHKESEERIRRLEDEYRRALETSAELIRRILDELRKN

SEQ ID NO: 26124 - protein, 59 aa, Artificial Sequence
  Synthetic
KRVKDIVRKILRVIEENLKFVAEAVKKLKEIIERNLRLLEEIAKLLLDILEEVLKRLTT

SEQ ID NO: 26125 - protein, 59 aa, Artificial Sequence
  Synthetic
REKEVIEDIKRLLDEILKRLEEANKETEERLEKLRKEYRELLEDSKRKIKDIEAELRRL

SEQ ID NO: 26126 - protein, 59 aa, Artificial Sequence
  Synthetic
EAVKEIVKRLKEVIKDNLRVVEELVRKLKEIIEDNLRVLREIAKLLKDVLEKLLRDVRK

SEQ ID NO: 26127 - protein, 56 aa, Artificial Sequence
  Synthetic
DKDKRLEELLKRLKELNDKTFEELERILEELKRANERSLREAERILEELRRRIEER

SEQ ID NO: 26128 - protein, 59 aa, Artificial Sequence
  Synthetic
KDVKDIIRTILEVARDLLRLLEEDSRTNSEVVKRLLDLLREDSKANSEVVKRLLDVLRE

SEQ ID NO: 26129 - protein, 56 aa, Artificial Sequence
  Synthetic
SKEETLKRLLDELEKRNRETVERLERLLKELEDRNRRSLEELERVLEELERKIEES

SEQ ID NO: 26130 - protein, 59 aa, Artificial Sequence
  Synthetic
REVKDIVRKMEEVIRRLIEILRRDVELNLDVAKKLLELLKEDSKLNLDVARELLELLDR

SEQ ID NO: 26131 - protein, 57 aa, Artificial Sequence
  Synthetic
RELELLDELLRRTERLVKEYLRVSKELLEETLKLLTELLKLSKRLLEETERLLRRDK

SEQ ID NO: 26132 - protein, 60 aa, Artificial Sequence
  Synthetic
KTELLEEAVKRLETLLRRYKEEIRRVAKRLEELLRELNELSKRLEETLKKLLEDLREDAR

SEQ ID NO: 26133 - protein, 57 aa, Artificial Sequence
  Synthetic
DEEETLRRLLERKVELAKEYLDVSKEVIDRTTKLLDEYLKTSKRIVDKTVELLERDD

SEQ ID NO: 26134 - protein, 60 aa, Artificial Sequence
  Synthetic
LRERLEEARRRLEELLRELNEITKDLERKLEKLLRDLNELTKRLEEELKRLLDELKKRTD

SEQ ID NO: 26135 - protein, 61 aa, Artificial Sequence
  Synthetic
SEEDELVKRLRELVKELIDAIREHLRRLEELLRELLKALEDHLRKLAELVRRIIEELRRTN

SEQ ID NO: 26136 - protein, 59 aa, Artificial Sequence
  Synthetic
EELKERIRRIVETIRRSLERLKEEADRIVKEIEKSLRELEERLERIVDTIRKLLEDAKR

SEQ ID NO: 26137 - protein, 61 aa, Artificial Sequence
  Synthetic
SEDDVLRKLLEAIKKLLKETKEILDRYLRESDRHNKALREILERLLELIKTLLEDLVRRTG

SEQ ID NO: 26138 - protein, 59 aa, Artificial Sequence
  Synthetic
EEALKEIKRKLRELEKEIRKVVEDSRRISEESLRRLEKALEDIERILKKLSDEIRTDAT

SEQ ID NO: 26139 - protein, 58 aa, Artificial Sequence
  Synthetic
DEEEVTKEVERLNRELLKRLREIVEETKDLNRRLLEILEELVRRTEKLLKDVLEIRKR

SEQ ID NO: 26140 - protein, 56 aa, Artificial Sequence
  Synthetic
KDRLREELKKLLEELRRVLEDAKRKSEELSRRLEEVLRRAEEKNKEIMDRIRKARE

SEQ ID NO: 26141 - protein, 57 aa, Artificial Sequence
  Synthetic
KEKEELLEEVERKVTELKKRSEDLVRKLDEEVKRLEREHEELLKKLRDAVEELRRAK

SEQ ID NO: 26142 - protein, 60 aa, Artificial Sequence
  Synthetic
RETVLRKIIRLVEELLKILARINEEVKKLIRKLLEILTRINKKMIEVIDELVKIIREAAT

SEQ ID NO: 26143 - protein, 56 aa, Artificial Sequence
  Synthetic
SEEERTKESLKKVLKALVDLNRELLRKLEENMRELTKLNEEVKRKLKEVLDKVREN

SEQ ID NO: 26144 - protein, 59 aa, Artificial Sequence
  Synthetic
EEIRKIVEEILKEIKELADRYREEVRKSKDKLRRILEDYKRKVDELKERLRELIEEVET

SEQ ID NO: 26145 - protein, 59 aa, Artificial Sequence
  Synthetic
SLKELAEEVLRRILELLRRIIEIHERSLERSNRTLKKLIDEIERVMREILETLKRALSI

SEQ ID NO: 26146 - protein, 56 aa, Artificial Sequence
  Synthetic
RTLLEEIRRRVEKVIREARETLREHRERVERSIEELRRMLEDVERIVREAIERLRR

SEQ ID NO: 26147 - protein, 61 aa, Artificial Sequence
  Synthetic
SEVEDILRRLAELNKRLIDKLRELIDRIRRLNEELLRVVEDILRRLKRLADELIRVVRERG

SEQ ID NO: 26148 - protein, 56 aa, Artificial Sequence
  Synthetic
DEDLKRLLEKLKEDVERVLKEVRDRTRESLKHLEDVIRELEKKTEDSLRHMEERRK

SEQ ID NO: 26149 - protein, 57 aa, Artificial Sequence
  Synthetic
SKEELVKEALEENVRSVEEVIKLLKDALDENLKVVERVIRELKRALERVKDVIRKLI

SEQ ID NO: 26150 - protein, 59 aa, Artificial Sequence
  Synthetic
KKVADELKKLLDELKKILEEIRRMLEEANRKHDDIVRDIRRVLEENDRKLEKIADDIRR

SEQ ID NO: 26151 - protein, 57 aa, Artificial Sequence
  Synthetic
SKKEELEKLLDTNLTEIRRLLKRVKDVLDRNLEVVRRVIEELARLLDEVTEVVRRLI

SEQ ID NO: 26152 - protein, 59 aa, Artificial Sequence
  Synthetic
EKVKRELEKLIKRVKDILDDIRRRLKKVNEEHEREADRLRRELERLDRELKKRMDDIRR

SEQ ID NO: 26153 - protein, 56 aa, Artificial Sequence
  Synthetic
DEDEELKERTKKSLEKLRRLLERLEKIIRESLDKLRDLLRLLEEALKRILDELRRN

SEQ ID NO: 26154 - protein, 56 aa, Artificial Sequence
  Synthetic
RDKLEKIERDIRKIIRDLEEIARRLKEDHERVIKELRETVKKHKEDLEEVIRELRR

SEQ ID NO: 26155 - protein, 55 aa, Artificial Sequence
  Synthetic
REKEDVARRIKRIHDELETRIRKLARDLERIHRKLKEDIERLVREAEKKLRELEK

SEQ ID NO: 26156 - protein, 55 aa, Artificial Sequence
  Synthetic
EEIERLVEELKKILETILKLIAELNEEVVRLLEDILRLVRELNERVAELLERAEK

SEQ ID NO: 26157 - protein, 60 aa, Artificial Sequence
  Synthetic
DEERIIKTLEDINKKLVEDIKRILDKVRELNERLADAIRKILEETKRILERTTRKVRKDG

SEQ ID NO: 26158 - protein, 56 aa, Artificial Sequence
  Synthetic
KDTLRTVEKLVEDVKRRLDKLLEDYKRLIEEVKKELDKLLKEYEDRLREIKKRIDE

SEQ ID NO: 26159 - protein, 59 aa, Artificial Sequence
  Synthetic
DLEDAIRELLRRLTELIEELVRILEELNKRLNDLVRRLVEILRRINELLKKLVDRLRKD

SEQ ID NO: 26160 - protein, 59 aa, Artificial Sequence
  Synthetic
ERELKKVLDDIREKVKKTIKEIDEVLEKITRENERTRKEIEEMLRTLRELIKRLLEETK

SEQ ID NO: 26161 - protein, 56 aa, Artificial Sequence
  Synthetic
SEEDEVAKTLEDILRRLEELLREHHELHRRILEELEKLLRDHIKLHKDILDEATKS

SEQ ID NO: 26162 - protein, 56 aa, Artificial Sequence
  Synthetic
KETLKRLKDRSKELNDRVRETLKRLAERSKRLNEKVEEDVRRAVEELRRLLEEIRK

SEQ ID NO: 26163 - protein, 56 aa, Artificial Sequence
  Synthetic
DERKVIEDLVEVLRDLLRVIKEVLDRNVKLIKDLLRLNLKVAEELIRVLKELLDRL

SEQ ID NO: 26164 - protein, 55 aa, Artificial Sequence
  Synthetic
EELDRIRKELKRLLDELTKLHEDVRKKSEELVREAERTLEDVKRKLDELLERAKK

SEQ ID NO: 26165 - protein, 60 aa, Artificial Sequence
  Synthetic
DEERELERLLEDVRRRHEELLRRLEKLLEDIRKLYEDVRRKLKRLLERVDRLVREILRRD

SEQ ID NO: 26166 - protein, 58 aa, Artificial Sequence
  Synthetic
ELIKELADIVKEILRLAEELAKELEKINRELDRVTRELIKDLLRISRELIKRLEDTTR

SEQ ID NO: 26167 - protein, 58 aa, Artificial Sequence
  Synthetic
SDKELLDDTIRKMRKLHRDSVELLDDIRRKLEELLRKVRELLDRNVKKIRELIELRKK

SEQ ID NO: 26168 - protein, 56 aa, Artificial Sequence
  Synthetic
DSDLEDLIRRDIEELKKVIEKLEELVRRIEELLREAKERDKESLDRIEDELRKAKK

SEQ ID NO: 26169 - protein, 58 aa, Artificial Sequence
  Synthetic
EEDDLLKANLDTLRELHKESEKLLRDIEETAKELHKKSEELLKRITDELDRLVKLSRK

SEQ ID NO: 26170 - protein, 56 aa, Artificial Sequence
  Synthetic
DSDIKRILDDLRRRLEDALRRDRETLKRLKEEIERVKKEDRRSLERDKEELEKARK

SEQ ID NO: 26171 - protein, 56 aa, Artificial Sequence
  Synthetic
SAAELILKAAKEAAEANREAAELALKAAEESARAAREAAELALKAAKEAAEAARRG

SEQ ID NO: 26172 - protein, 56 aa, Artificial Sequence
  Synthetic
KDDLTRAADELLKKAKKLADDYKRAADRLLKEAEDLAREWKKLADKALEDAKRDAD

SEQ ID NO: 26173 - protein, 56 aa, Artificial Sequence
  Synthetic
KAEEAAKEAARLAKEDADLAKKAAEDAAELHERHAKLLEDSARTAAELAKRLAEAA

SEQ ID NO: 26174 - protein, 59 aa, Artificial Sequence
  Synthetic
KEDLDRLAKIAKEAADALEELLERSKESAERAARALEKLLKEWADSAKKAADALEELDR

SEQ ID NO: 26175 - protein, 60 aa, Artificial Sequence
  Synthetic
DELETLKKEAEDVLRELRDILRKLEDLSRKTIEDMRRIVEEVLKLNEDSIRELKRIIEEL

SEQ ID NO: 26176 - protein, 55 aa, Artificial Sequence
  Synthetic
DEVVKKLEDVSRKSIDDLRKIIETLREVVERSIEEIERIIRDLERVIREIIEREK

SEQ ID NO: 26177 - protein, 57 aa, Artificial Sequence
  Synthetic
SKIEELAKIAEEHAELNRRAARKNNEIAKEAAELWKRAAEKHVRIAERAADAIRKAA

SEQ ID NO: 26178 - protein, 59 aa, Artificial Sequence
  Synthetic
EKALREAKELAERAARENREALKEAKELAKRNSEKAKESAKEHKKLAEDANKRAEEATR

SEQ ID NO: 26179 - protein, 59 aa, Artificial Sequence
  Synthetic
DEEEVIEEILKTLEEINRRVLKLIKDILEKVKRVDDEIKTLVKEVLRENERVLREVREK

SEQ ID NO: 26180 - protein, 59 aa, Artificial Sequence
  Synthetic
EKMLEDILRRLEEINRTSLRLVDEVSKKTREVLERILKLVKEVLDESRRVAKKVKDDLK

SEQ ID NO: 26181 - protein, 57 aa, Artificial Sequence
  Synthetic
SAVDIAREAARRVIELLKRSAEAAEEAARRSIKLAKESADAAREAAKKVIEILKRAA

SEQ ID NO: 26182 - protein, 56 aa, Artificial Sequence
  Synthetic
EDAARKAAEIAARAAKRSADTAKRWAEVAKEAAEESAKSAKKAAKIAEDAAREIEK

SEQ ID NO: 26183 - protein, 57 aa, Artificial Sequence
  Synthetic
DLREAAKEAIDAAEEAARRTEEAAKENIRALEEAAKRTRDAVRRAIKAIEDAVRDAG

SEQ ID NO: 26184 - protein, 56 aa, Artificial Sequence
  Synthetic
REDLERIAREAAERAKELADRLEEIYRRAAEESKRLAEELKRIYKRAAEEAKKAAD

SEQ ID NO: 26185 - protein, 57 aa, Artificial Sequence
  Synthetic
SKIEELMKLVEKIIRKTLDLVRKHAEVSKEVLKEYIRISKEHLDVSKRVAEELKKEI

SEQ ID NO: 26186 - protein, 59 aa, Artificial Sequence
  Synthetic
KEDLDRIRDTLRRVIERSKRIHDRLREMLEEVKRRSEEIVERIERELRDVARKLEETLR

SEQ ID NO: 26187 - protein, 59 aa, Artificial Sequence
  Synthetic
SLTEELRRVVKEIEEVVRRDVRTLEEVVKKITEVVRRDDKSLREVVKRNEELVRLLARG

SEQ ID NO: 26188 - protein, 60 aa, Artificial Sequence
  Synthetic
EKDRREILRELVELTERSVEEIARVNKELVDIVRELVKELKRLNERLVELVKRLVEETAT

SEQ ID NO: 26189 - protein, 56 aa, Artificial Sequence
  Synthetic
RAIETLVDVVREAIEINKRLVDRNVESNKELAKLNRDLVRRNRESNTELADLVRRD

SEQ ID NO: 26190 - protein, 60 aa, Artificial Sequence
  Synthetic
EEELKRVVDEIVELLKRVLETTEKVVRDNVRLLEKALRSSKKVLDENVKKLEDVLRDLKR

SEQ ID NO: 26191 - protein, 56 aa, Artificial Sequence
  Synthetic
SAAEALAKLAKENAELNRELAERNARSNKELAELNEEAARRNAKSNKELAELARRE

SEQ ID NO: 26192 - protein, 60 aa, Artificial Sequence
  Synthetic
EEELKRAIEEAAKLLKRAADETRRAAKENAEALEKAARESKEAAKDNAEALKKAAEEAKK

SEQ ID NO: 26193 - protein, 58 aa, Artificial Sequence
  Synthetic
TEEEVVEDVKRVLDESHDDLRRLIETLTRVLRESLKRIKEALEELERVLKKLLDLLEG

SEQ ID NO: 26194 - protein, 56 aa, Artificial Sequence
  Synthetic
REEVKRVLEEARDELRRLLEEYKKIIEELERELERLLREHREVIRRIKEEIDKSSK

SEQ ID NO: 26195 - protein, 59 aa, Artificial Sequence
  Synthetic
SEVERAVEDVKRALEENVRLSKELVDRVTKMAEDNVKLTKDIVDKVRRILEELVEVIER

SEQ ID NO: 26196 - protein, 56 aa, Artificial Sequence
  Synthetic
KDEVRKIVRELVEEAKKVVEYDTENAKRVVEELKRVVKRDADVVRKLVELLDRKAR

SEQ ID NO: 26197 - protein, 59 aa, Artificial Sequence
  Synthetic
SELEEAVKRVRDALRENLDSIRRLVEKIRRVLEEHNKLSKELVDRIEEVLRRTVEAVKK

SEQ ID NO: 26198 - protein, 56 aa, Artificial Sequence
  Synthetic
KRDVARVVRELIELVKRVLERDKRIVDELVKLVDEVLKRNKEIVDELVRLVDEARR

SEQ ID NO: 26199 - protein, 56 aa, Artificial Sequence
  Synthetic
SELEDLIRLLREVIKRLEESVKELVDIVEEAIERLRKIVKELIDLSRKVIDELLEL

SEQ ID NO: 26200 - protein, 59 aa, Artificial Sequence
  Synthetic
EELLDRIRRLIEESIKKLARIADRLRKLIEDLRRLLEELLRRNEELIERLERMLDEKAR

SEQ ID NO: 26201 - protein, 60 aa, Artificial Sequence
  Synthetic
SEKEEAAKAAEEAAEIAERADEKAARSSKEAAKIAEKADKEAAESTRKALDDARRALEEA

SEQ ID NO: 26202 - protein, 59 aa, Artificial Sequence
  Synthetic
EDAARRAEKAARENADSIRRAAEKSRKAAEDNARSIEKAARESEEAAERAARILKRAKD

SEQ ID NO: 26203 - protein, 57 aa, Artificial Sequence
  Synthetic
KEVEDVVEKLRELIDRALDRNRKVVEEVRDVVRRALEENRKVVEEVRKVIKEILDRV

SEQ ID NO: 26204 - protein, 55 aa, Artificial Sequence
  Synthetic
KEATDLIRELIERLRKVLEKSRRLIDRLVKLSRDVLEETKRLVEELIREVKRAET

SEQ ID NO: 26205 - protein, 60 aa, Artificial Sequence
  Synthetic
KLEEIVKKLEDLNKKAVEILRRVLEEHEKLVEKVKKVLRDVLRLLEKVVREVIETLKKKD

SEQ ID NO: 26206 - protein, 56 aa, Artificial Sequence
  Synthetic
EEVLRKLKEIIKELKDRLKKLLDDYERIIDELRRELERVLREYEKILEDLRKELED

SEQ ID NO: 26207 - protein, 60 aa, Artificial Sequence
  Synthetic
SELEEAAKALERIAKKAAKAARDWAEEDRRLAEEAIRAAEEWAKENKKLADELAKAAKDN

SEQ ID NO: 26208 - protein, 56 aa, Artificial Sequence
  Synthetic
SDEAVRALEEAAKRSEDAARKAAKLARDAAEKSRRAAEKAIRLLEEAAKEAKDAAR

SEQ ID NO: 26209 - protein, 57 aa, Artificial Sequence
  Synthetic
KEAEEIAEAVKRLAEASAKTAEELARAVRKAAEDLVKLAKEHADALRTAADRIAKLI

SEQ ID NO: 26210 - protein, 59 aa, Artificial Sequence
  Synthetic
EDIRREIKRIADELKEITKRLEDEVEKIIRRLEKIAKEAEDRHRKLAEELRRIAEEAKR

SEQ ID NO: 26211 - protein, 59 aa, Artificial Sequence
  Synthetic
SVDEALEELVRRLLEVLKTVLERTKELSRDDLRVVKEVLRIIEELVKRLLKVIRDGLDD

SEQ ID NO: 26212 - protein, 59 aa, Artificial Sequence
  Synthetic
EDVRRDIERLLEELKRRVERLLEDIERLLRELEKLNEDVLRENKKLLEDLERRVRERKK

SEQ ID NO: 26213 - protein, 60 aa, Artificial Sequence
  Synthetic
DEERIVREIVKIIEEAVKELVRLVREDIELVKDVVRRHNRLNEEIVKLWKELVDEVLKSR

SEQ ID NO: 26214 - protein, 56 aa, Artificial Sequence
  Synthetic
KDLLRRAEEEIRRLLKENEDILKRVEEEVKKSNEELRRILDRVRRELEKALKRLRD

SEQ ID NO: 26215 - protein, 60 aa, Artificial Sequence
  Synthetic
SKEEEVKRLIDELKRVNERVNKTIKELVKLLEESHEEVLKEIERLIREVLRVIKEVIEAV

SEQ ID NO: 26216 - protein, 59 aa, Artificial Sequence
  Synthetic
KEALDKLVDAARRVLEAVRDVLRKDERSVERVLDEVRRVAEELERTHREVVKRVEDAAR

SEQ ID NO: 26217 - protein, 60 aa, Artificial Sequence
  Synthetic
DKEKTVADLIEKVERSHERVLKRLAELIEELKRVNERVNREIERLIRELEEVIDRVIKAV

SEQ ID NO: 26218 - protein, 59 aa, Artificial Sequence
  Synthetic
REMLEELVRVARRVLEAIKTVADELRKRHEEVSREIERVAEEDKRTVEEVLKRIEDAAR

SEQ ID NO: 26219 - protein, 60 aa, Artificial Sequence
  Synthetic
KDEEIIKRLEDLLKENVDRLREILERVERTHRKVIEELKRILEELEEILRRVIEKLRRKN

SEQ ID NO: 26220 - protein, 55 aa, Artificial Sequence
  Synthetic
RDVERLLKELKRIVEEILRLVRELVTRDIDALRRLLESVRRLVDKLIRIVEERRR

SEQ ID NO: 26221 - protein, 60 aa, Artificial Sequence
  Synthetic
SDKDRLLEEIKRLIDESRRKAEEILKRSTELLEDSKRDLREILRRSEKILDELLDLIRRN

SEQ ID NO: 26222 - protein, 60 aa, Artificial Sequence
  Synthetic
SKEIKDALRRVLEKHKKVLREAIKKHEESLEEHRKVLEEIIELHKRSLKKLEDVIDTVRK

SEQ ID NO: 26223 - protein, 60 aa, Artificial Sequence
  Synthetic
SKEELIKELKETVKRIIKLLEELSKKMEEIIKRIAELLRELSKKLVDIIKRIIELLRREG

SEQ ID NO: 26224 - protein, 55 aa, Artificial Sequence
  Synthetic
EEILKEIKRLLDESKERLDRVLREIEELLRRYEEEVRRVLEEIKKILDELRERIR

SEQ ID NO: 26225 - protein, 56 aa, Artificial Sequence
  Synthetic
DTERAADEARRRLEKLARDHKEKLKKAAEDLRRLLEEAERAHRKIEKELEELTRKV

SEQ ID NO: 26226 - protein, 57 aa, Artificial Sequence
  Synthetic
AERALKEAADRAREALRRNLRALREAVREAEEAIEKDARAIDEALKKAREAIEEAER

SEQ ID NO: 26227 - protein, 56 aa, Artificial Sequence
  Synthetic
SKVEELAERAARSHKELADAIRELAREAAESHKEAAEVVKRLADEAARAAKEVAKA

SEQ ID NO: 26228 - protein, 56 aa, Artificial Sequence
  Synthetic
RKVLEDAKKILEDLRKKAEDALRKHKKILDELEEKAKKAAEKHERILRKLDEDAKR

SEQ ID NO: 26229 - protein, 59 aa, Artificial Sequence
  Synthetic
SEDEEVLKDIKRLLEEVKKTLEEVAKRHEKALREIEERVKEIVKEHEDLLKEVEDKARS

SEQ ID NO: 26230 - protein, 60 aa, Artificial Sequence
  Synthetic
KEDLDRLLKEVLDISRKVLEEVLKIIKRVLEISKRVLEEILRRIEKVLRDIDRVLKKLRE

SEQ ID NO: 26231 - protein, 57 aa, Artificial Sequence
  Synthetic
SREEDLARKIAEAVKELLDADRRLLREIEKLAEELLRINEELLRRLEELARELLEAV

SEQ ID NO: 26232 - protein, 56 aa, Artificial Sequence
  Synthetic
ERLLRKLEEILRRLKDESRKVLKKVKEILDRLKRETEEILDKVRKILERLEEEVRR

SEQ ID NO: 26233 - protein, 59 aa, Artificial Sequence
  Synthetic
SAEEAAEEALRRAAEAAKESIKAAREALEEVRKAAEKSIRAAEKALRDVKKAAEEAKSA

SEQ ID NO: 26234 - protein, 57 aa, Artificial Sequence
  Synthetic
IEEAAKKAIDLARDHARLVKKIAKDLIDLAKEHADLVREIAKRIIEAAKRIAEIVRK

SEQ ID NO: 26235 - protein, 60 aa, Artificial Sequence
  Synthetic
SDEELLEEIKKILDEVLKKNADAVRSLEKVLDKVLEDNARAVEELKTVLDKVLRDLERRG

SEQ ID NO: 26236 - protein, 55 aa, Artificial Sequence
  Synthetic
KDVEEVVKEVRDVLRESVDKVRRVIEEVKRVLDRSSEEVERAVEEVKRVLDKVRK

SEQ ID NO: 26237 - protein, 61 aa, Artificial Sequence
  Synthetic
SDEELLERVERLLRELLDTNRRMLEEVEKELRRLLETNKKTLDDVRRLLKELLDVLETRGV

SEQ ID NO: 26238 - protein, 55 aa, Artificial Sequence
  Synthetic
DDLRELKKRIEDLLKEDKERLEKIARDIERDLERYARDLKRLEDELREDIERARR

SEQ ID NO: 26239 - protein, 61 aa, Artificial Sequence; identical to SEQ ID NO: 26237
  Synthetic

SEQ ID NO: 26240 - protein, 55 aa, Artificial Sequence; identical to SEQ ID NO: 26238
  Synthetic

SEQ ID NO: 26241 - protein, 56 aa, Artificial Sequence
  Synthetic
EEDERLTKRVEEIKRENRELLRRLEEEVKELERKSEKIVRDLKEKVDRAKEKLDSG

SEQ ID NO: 26242 - protein, 57 aa, Artificial Sequence; identical to SEQ ID NO: 25298
  Synthetic

SEQ ID NO: 26243 - protein, 56 aa, Artificial Sequence; identical to SEQ ID NO: 26241
  Synthetic

SEQ ID NO: 26244 - protein, 57 aa, Artificial Sequence; identical to SEQ ID NO: 25298
  Synthetic

SEQ ID NO: 26245 - protein, 58 aa, Artificial Sequence
  Synthetic
TEEEVLRKVEKLIKDLLDVLRDLLRASEEVVREALRVLEELIEENKRVIEELSRALSG

SEQ ID NO: 26246 - protein, 60 aa, Artificial Sequence
  Synthetic
EEKLRRDLTETKKELEKRHEDLRRELEKLLRDYKRELEEIERALEEIEKTLKRRADETRR

SEQ ID NO: 26247 - protein, 58 aa, Artificial Sequence; identical to SEQ ID NO: 26245
  Synthetic

SEQ ID NO: 26248 - protein, 60 aa, Artificial Sequence; identical to SEQ ID NO: 26246
  Synthetic

SEQ ID NO: 26249 - protein, 60 aa, Artificial Sequence
  Synthetic
SAKETIRKLIEENKDIIRKLAEKLKRLLEESERIAEEALRLIKELLERIERALRRVGSGI

SEQ ID NO: 26250 - protein, 55 aa, Artificial Sequence
  Synthetic
KELEKLLEDLEREIRRLAKRLKELSDRLEEKIRKIKRELDDLSARLREKIERTRK

SEQ ID NO: 26251 - protein, 60 aa, Artificial Sequence; identical to SEQ ID NO: 26249
  Synthetic

SEQ ID NO: 26252 - protein, 55 aa, Artificial Sequence; identical to SEQ ID NO: 26250
  Synthetic

SEQ ID NO: 26253 - protein, 59 aa, Artificial Sequence; identical to SEQ ID NO: 25341
  Synthetic

SEQ ID NO: 26254 - protein, 56 aa, Artificial Sequence; identical to SEQ ID NO: 25342
  Synthetic

SEQ ID NO: 26255 - protein, 59 aa, Artificial Sequence; identical to SEQ ID NO: 25341
  Synthetic

SEQ ID NO: 26256 - protein, 56 aa, Artificial Sequence; identical to SEQ ID NO: 25342
  Synthetic

SEQ ID NO: 26257 - protein, 60 aa, Artificial Sequence; identical to SEQ ID NO: 25343
  Synthetic

SEQ ID NO: 26258 - protein, 58 aa, Artificial Sequence
  Synthetic
EEIKRLKEELERRHRRLEEEVERVARELEKAHRDLERDIRRVAEELKKLLKKLRDDRR

SEQ ID NO: 26259 - protein, 60 aa, Artificial Sequence; identical to SEQ ID NO: 25343
  Synthetic

SEQ ID NO: 26260 - protein, 58 aa, Artificial Sequence; identical to SEQ ID NO: 26258
  Synthetic

SEQ ID NO: 26261 - protein, 60 aa, Artificial Sequence
  Synthetic
SAEETVERLLEEARKRHEEIIKKAKELLDRAREEHERIIREAEKLLEEIKKRVDELVRDG

SEQ ID NO: 26262 - protein, 56 aa, Artificial Sequence; identical to SEQ ID NO: 25348
  Synthetic

SEQ ID NO: 26263 - protein, 60 aa, Artificial Sequence; identical to SEQ ID NO: 26261
  Synthetic

SEQ ID NO: 26264 - protein, 56 aa, Artificial Sequence; identical to SEQ ID NO: 25348
  Synthetic

SEQ ID NO: 26265 - protein, 56 aa, Artificial Sequence
  Synthetic
SEKEELKRLLDKLLKELKRLSDELKATIDKILKILKEVSEEVKRTADELLDAIRRG

SEQ ID NO: 26266 - protein, 59 aa, Artificial Sequence
  Synthetic
EDELRKVEEDLKRLEDKLKKLLEDYEKKVRELEETLDDLLRKYEETLRRLEKELEEAER

SEQ ID NO: 26267 - protein, 56 aa, Artificial Sequence; identical to SEQ ID NO: 26265
  Synthetic

SEQ ID NO: 26268 - protein, 59 aa, Artificial Sequence; identical to SEQ ID NO: 26266
  Synthetic

SEQ ID NO: 26269 - protein, 60 aa, Artificial Sequence
  Synthetic
SDAERLVKKIADSLRAYEDLLRKLVERIRDLLRAYEEELRKLLTEIEKTLEDVRDVLRRG

SEQ ID NO: 26270 - protein, 58 aa, Artificial Sequence
  Synthetic
DLLEALRRLVERLKRLIERVLKLNRELVKKLLELLEEALRANRRLVEDILKIADEARK

SEQ ID NO: 26271 - protein, 60 aa, Artificial Sequence; identical to SEQ ID NO: 26269
  Synthetic

SEQ ID NO: 26272 - protein, 58 aa, Artificial Sequence; identical to SEQ ID NO: 26270
  Synthetic

SEQ ID NO: 26273 - protein, 59 aa, Artificial Sequence
  Synthetic
SATERVLDLARDLIRILLEIHKRALKLIAELVSKLLKIHEDVLKLSEELVEELLEIVKR

SEQ ID NO: 26274 - protein, 60 aa, Artificial Sequence
  Synthetic
EDTLRRVLERIREEVERVKEKHRRLLEELKKLLEELRARSADLLEDIKRKVRELEEKTRR

SEQ ID NO: 26275 - protein, 59 aa, Artificial Sequence; identical to SEQ ID NO: 26273
  Synthetic

SEQ ID NO: 26276 - protein, 60 aa, Artificial Sequence; identical to SEQ ID NO: 26274
  Synthetic

SEQ ID NO: 26277 - protein, 56 aa, Artificial Sequence; identical to SEQ ID NO: 25371
  Synthetic

SEQ ID NO: 26278 - protein, 60 aa, Artificial Sequence
  Synthetic
RERLARLLKALADKLIRVLEEILKINEELNRKIIKFARENLERNRRVNKKVIEVLREAAR

SEQ ID NO: 26279 - protein, 56 aa, Artificial Sequence; identical to SEQ ID NO: 25371
  Synthetic

SEQ ID NO: 26280 - protein, 60 aa, Artificial Sequence; identical to SEQ ID NO: 26278
  Synthetic

SEQ ID NO: 26281 - protein, 61 aa, Artificial Sequence
  Synthetic
STEEILKRVKEILDELAKELRDIIRESLRTIEELLDELRRILEESERTLEELVKTIKDGVK

SEQ ID NO: 26282 - protein, 59 aa, Artificial Sequence; identical to SEQ ID NO: 25380
  Synthetic

SEQ ID NO: 26283 - protein, 61 aa, Artificial Sequence; identical to SEQ ID NO: 26281
  Synthetic

SEQ ID NO: 26284 - protein, 59 aa, Artificial Sequence; identical to SEQ ID NO: 25380
  Synthetic

SEQ ID NO: 26285 - protein, 60 aa, Artificial Sequence
  Synthetic
SEKEELLKLIKRVIELLKRVLEEHLRLVEDVIRRLKELLDSNEKIVREVIEDLKRLLDEV

SEQ ID NO: 26286 - protein, 59 aa, Artificial Sequence
  Synthetic
EDLLRKAKKVITEVREKLKRNLEDVRRVIEDVKRKSARILEEARRLIEEVERELEKIRK

SEQ ID NO: 26287 - protein, 60 aa, Artificial Sequence; identical to SEQ ID NO: 26285
  Synthetic

SEQ ID NO: 26288 - protein, 59 aa, Artificial Sequence; identical to SEQ ID NO: 26286
  Synthetic

SEQ ID NO: 26289 - protein, 57 aa, Artificial Sequence
  Synthetic
SRAERIKRALEEHIRKLKEITDEVRKTNEELLELTRRILEEAKKANEELVKKIREAG

SEQ ID NO: 26290 - protein, 56 aa, Artificial Sequence; identical to SEQ ID NO: 25390
  Synthetic

SEQ ID NO: 26291 - protein, 57 aa, Artificial Sequence; identical to SEQ ID NO: 26289
  Synthetic

SEQ ID NO: 26292 - protein, 56 aa, Artificial Sequence; identical to SEQ ID NO: 25390
  Synthetic

SEQ ID NO: 26293 - protein, 57 aa, Artificial Sequence
  Synthetic
SEAEKIREALETNLRLLEELIKRLKEILDTHNELLRRVIETLERLLKELLELLEEGG

SEQ ID NO: 26294 - protein, 56 aa, Artificial Sequence
  Synthetic
KEDLERLRRKVEELEDRLRRLLEKLARDSAELMRELERILDRYARESEELDRRLAE

SEQ ID NO: 26295 - protein, 57 aa, Artificial Sequence; identical to SEQ ID NO: 26293
  Synthetic

SEQ ID NO: 26296 - protein, 56 aa, Artificial Sequence; identical to SEQ ID NO: 26294
  Synthetic

SEQ ID NO: 26297 - protein, 62 aa, Artificial Sequence
  Synthetic
SAEEELEKLVRKVEEDLKRLEEESERIKKEIKDTLRAIRKRSEDLKRKVKELLRRLEEEGRR

SEQ ID NO: 26298 - protein, 60 aa, Artificial Sequence
  Synthetic
ADEALEMLKRLLDKALKVHEDVLRKLVELVDEVLKVHEESLRKLLTLAAKVLEVLRKITK

SEQ ID NO: 26299 - protein, 62 aa, Artificial Sequence; identical to SEQ ID NO: 26297
  Synthetic

SEQ ID NO: 26300 - protein, 60 aa, Artificial Sequence; identical to SEQ ID NO: 26298
  Synthetic

SEQ ID NO: 26301 - protein, 60 aa, Artificial Sequence
  Synthetic
DDERRKLEDLERMVEELKRKSDKLLKEIREEVERLERETRKLLEELKAKVDELREDLRRN

SEQ ID NO: 26302 - protein, 55 aa, Artificial Sequence
  Synthetic
EDLEKAERLVKDILRLNEEHTAELEDVVRDLLRALEKHTRDLEKLVKDALDKVKT

SEQ ID NO: 26303 - protein, 60 aa, Artificial Sequence; identical to SEQ ID NO: 26301
  Synthetic

SEQ ID NO: 26304 - protein, 55 aa, Artificial Sequence; identical to SEQ ID NO: 26302
  Synthetic

SEQ ID NO: 26305 - protein, 62 aa, Artificial Sequence
  Synthetic
SKIDEALKKLAKILEDAIKLNKELNDTTAEILKEIIKLNAEVLEKIRRILKELVDLILKGLK

SEQ ID NO: 26306 - protein, 55 aa, Artificial Sequence; identical to SEQ ID NO: 25416
  Synthetic

SEQ ID NO: 26307 - protein, 62 aa, Artificial Sequence; identical to SEQ ID NO: 26305
  Synthetic

SEQ ID NO: 26308 - protein, 55 aa, Artificial Sequence; identical to SEQ ID NO: 25416
  Synthetic

SEQ ID NO: 26309 - protein, 59 aa, Artificial Sequence; identical to SEQ ID NO: 25421
  Synthetic

SEQ ID NO: 26310 - protein, 60 aa, Artificial Sequence
  Synthetic
KETLARDLKEALKTLIKLIREILEDNLRVLRRIIELIETLLEDNRRVLEEIIKLIEEATT

SEQ ID NO: 26311 - protein, 60 aa, Artificial Sequence
  Synthetic
DEEEKIREDLERTLREYERELRRAKEELKETLKRYEEELREVKEDLDRTLEEVDDLLRRG

SEQ ID NO: 26312 - protein, 60 aa, Artificial Sequence; identical to SEQ ID NO: 26310
  Synthetic

SEQ ID NO: 26313 - protein, 58 aa, Artificial Sequence
  Synthetic
DELEKVERLLEEIEKIIEDLIRRVEELVRRILEFNKTTLKRNEELVRELEKLVKETTG

SEQ ID NO: 26314 - protein, 59 aa, Artificial Sequence; identical to SEQ ID NO: 25426
  Synthetic

SEQ ID NO: 26315 - protein, 58 aa, Artificial Sequence; identical to SEQ ID NO: 26313
  Synthetic

SEQ ID NO: 26316 - protein, 59 aa, Artificial Sequence; identical to SEQ ID NO: 25426
  Synthetic

SEQ ID NO: 26317 - protein, 56 aa, Artificial Sequence
  Synthetic
SEKERLMRLLDKLKDLNRRLVERIKELLDKALELHKKLVKELRELLERLKELVERG

SEQ ID NO: 26318 - protein, 59 aa, Artificial Sequence
  Synthetic
EETVRRLREALKKLEDDLRKIERDAEREYKKLKDELEELTERYRREIRKLKEELKADRK

SEQ ID NO: 26319 - protein, 56 aa, Artificial Sequence; identical to SEQ ID NO: 26317
  Synthetic

SEQ ID NO: 26320 - protein, 59 aa, Artificial Sequence; identical to SEQ ID NO: 26318
  Synthetic

SEQ ID NO: 26321 - protein, 56 aa, Artificial Sequence
  Synthetic
SEAEDLEELIKELAELLKDVIRKLEKINRRLVKILEDIIRRLKEISKEAEEELRKG

SEQ ID NO: 26322 - protein, 59 aa, Artificial Sequence; identical to SEQ ID NO: 25434
  Synthetic

SEQ ID NO: 26323 - protein, 56 aa, Artificial Sequence; identical to SEQ ID NO: 26321
  Synthetic

SEQ ID NO: 26324 - protein, 59 aa, Artificial Sequence; identical to SEQ ID NO: 25434
  Synthetic

SEQ ID NO: 26325 - protein, 60 aa, Artificial Sequence; identical to SEQ ID NO: 25439
  Synthetic

SEQ ID NO: 26326 - protein, 60 aa, Artificial Sequence; identical to SEQ ID NO: 25440
  Synthetic

SEQ ID NO: 26327 - protein, 60 aa, Artificial Sequence; identical to SEQ ID NO: 25439
  Synthetic

SEQ ID NO: 26328 - protein, 60 aa, Artificial Sequence; identical to SEQ ID NO: 25440
  Synthetic

SEQ ID NO: 26329 - protein, 60 aa, Artificial Sequence; identical to SEQ ID NO: 25441
  Synthetic

SEQ ID NO: 26330 - protein, 59 aa, Artificial Sequence; identical to SEQ ID NO: 25442
  Synthetic

SEQ ID NO: 26331 - protein, 60 aa, Artificial Sequence; identical to SEQ ID NO: 25441
  Synthetic

SEQ ID NO: 26332 - protein, 59 aa, Artificial Sequence; identical to SEQ ID NO: 25442
  Synthetic

SEQ ID NO: 26333 - protein, 60 aa, Artificial Sequence
  Synthetic
DEDRIIEEIARLLEELLRELLELIKKLIETNRRLNEEHERAVRELARLLEELLDRLVKKG

SEQ ID NO: 26334 - protein, 59 aa, Artificial Sequence
  Synthetic
EKIAEEIERELEELRRMIKRLHEDLERKLKESEDELREIEARLEEKIRRLEEKLERKRR

SEQ ID NO: 26335 - protein, 60 aa, Artificial Sequence; identical to SEQ ID NO: 26333
  Synthetic

SEQ ID NO: 26336 - protein, 59 aa, Artificial Sequence; identical to SEQ ID NO: 26334
  Synthetic

SEQ ID NO: 26337 - protein, 59 aa, Artificial Sequence
  Synthetic
DEEEKIRTTLDLLRKLLKVLREILEELIRSNKELNERLLRLVEDSDRLLEELLKKLADD

SEQ ID NO: 26338 - protein, 59 aa, Artificial Sequence
  Synthetic
EEKVRDTEKKLRDLREKHAEIAKELERLLRENRRRLEELAREAKKVLDELRKRLEDERR

SEQ ID NO: 26339 - protein, 59 aa, Artificial Sequence; identical to SEQ ID NO: 26337
  Synthetic

SEQ ID NO: 26340 - protein, 59 aa, Artificial Sequence; identical to SEQ ID NO: 26338
  Synthetic

SEQ ID NO: 26341 - protein, 59 aa, Artificial Sequence
  Synthetic
SEKEKLLKESEEEVRRLRRTLEELLRKYREVLERLRKELREIEERVRDVVRRLKEVLDR

SEQ ID NO: 26342 - protein, 56 aa, Artificial Sequence
  Synthetic
ERLVKTLIEDVEAVIKRILELITRVAEDNERVLERIIRELTDNLERHLKIVREIVK

SEQ ID NO: 26343 - protein, 59 aa, Artificial Sequence; identical to SEQ ID NO: 26341
  Synthetic

SEQ ID NO: 26344 - protein, 56 aa, Artificial Sequence; identical to SEQ ID NO: 26342
  Synthetic

SEQ ID NO: 26345 - protein, 60 aa, Artificial Sequence
  Synthetic
SELERAEELIKKLLKLHEDVLRRLTEVDDELLEIHDRVLKRLKEVDDELLKLIRDMLRRG

SEQ ID NO: 26346 - protein, 58 aa, Artificial Sequence; identical to SEQ ID NO: 25488
  Synthetic

SEQ ID NO: 26347 - protein, 60 aa, Artificial Sequence; identical to SEQ ID NO: 26345
  Synthetic

SEQ ID NO: 26348 - protein, 58 aa, Artificial Sequence; identical to SEQ ID NO: 25488
  Synthetic

SEQ ID NO: 26349 - protein, 59 aa, Artificial Sequence; identical to SEQ ID NO: 25495
  Synthetic

SEQ ID NO: 26350 - protein, 55 aa, Artificial Sequence
  Synthetic
REIEKEIRRILEELKAKHDEIEKKIRELEREIKRAHEELEDRIRKIERDLDRRTK

SEQ ID NO: 26351 - protein, 59 aa, Artificial Sequence; identical to SEQ ID NO: 25495
  Synthetic

SEQ ID NO: 26352 - protein, 55 aa, Artificial Sequence; identical to SEQ ID NO: 26350
  Synthetic

SEQ ID NO: 26353 - protein, 60 aa, Artificial Sequence
  Synthetic
SSEELLKRIVDEDERVLEEWARVLEEIKDLSKAVVDLLDKVLKEIEAIVDEVTRRLERDG

SEQ ID NO: 26354 - protein, 55 aa, Artificial Sequence
  Synthetic
KDLLETIKKRVEEIRRTLEKIKRDYDKAIEEIRAKLERKLEEYKEVIDDLRRKTK

SEQ ID NO: 26355 - protein, 60 aa, Artificial Sequence; identical to SEQ ID NO: 26353
  Synthetic

SEQ ID NO: 26356 - protein, 55 aa, Artificial Sequence; identical to SEQ ID NO: 26354
  Synthetic

SEQ ID NO: 26357 - protein, 59 aa, Artificial Sequence; identical to SEQ ID NO: 25517
  Synthetic

SEQ ID NO: 26358 - protein, 56 aa, Artificial Sequence; identical to SEQ ID NO: 25518
  Synthetic

SEQ ID NO: 26359 - protein, 59 aa, Artificial Sequence; identical to SEQ ID NO: 25517
  Synthetic

SEQ ID NO: 26360 - protein, 56 aa, Artificial Sequence; identical to SEQ ID NO: 25518
  Synthetic

SEQ ID NO: 26361 - protein, 56 aa, Artificial Sequence
  Synthetic
DKAEVLREALKLLKDLLEELIKIHEESLKRILDLIDTLVKVHEDALRALKELLERS

SEQ ID NO: 26362 - protein, 55 aa, Artificial Sequence; identical to SEQ ID NO: 25524
  Synthetic

SEQ ID NO: 26363 - protein, 56 aa, Artificial Sequence; identical to SEQ ID NO: 26361
  Synthetic

SEQ ID NO: 26364 - protein, 55 aa, Artificial Sequence; identical to SEQ ID NO: 25524
  Synthetic

SEQ ID NO: 26365 - protein, 56 aa, Artificial Sequence
  Synthetic
STREKAKKVLDTLRADNEDMKRVVEKILRALKRTNERAEKLAREITEEIKRILKEV

SEQ ID NO: 26366 - protein, 56 aa, Artificial Sequence; identical to SEQ ID NO: 25528
  Synthetic

SEQ ID NO: 26367 - protein, 56 aa, Artificial Sequence; identical to SEQ ID NO: 26365
  Synthetic

SEQ ID NO: 26368 - protein, 56 aa, Artificial Sequence; identical to SEQ ID NO: 25528
  Synthetic

SEQ ID NO: 26369 - protein, 56 aa, Artificial Sequence
  Synthetic
SKAEKLLKDLREALEKVKRRYEELERRLDEVLKEHEEIVKRLLEELEKVLKRIEEG

SEQ ID NO: 26370 - protein, 59 aa, Artificial Sequence; identical to SEQ ID NO: 25542
  Synthetic

SEQ ID NO: 26371 - protein, 56 aa, Artificial Sequence; identical to SEQ ID NO: 26369
  Synthetic

SEQ ID NO: 26372 - protein, 59 aa, Artificial Sequence; identical to SEQ ID NO: 25542
  Synthetic

SEQ ID NO: 26373 - protein, 57 aa, Artificial Sequence; identical to SEQ ID NO: 25543
  Synthetic

SEQ ID NO: 26374 - protein, 59 aa, Artificial Sequence
  Synthetic
EDLLTELEKKLRKLKRDSEKVVDDLKKELERIKREVKRLIEENARTLADIKRAVDEARK

SEQ ID NO: 26375 - protein, 57 aa, Artificial Sequence; identical to SEQ ID NO: 25543
  Synthetic

SEQ ID NO: 26376 - protein, 59 aa, Artificial Sequence; identical to SEQ ID NO: 26374
  Synthetic

SEQ ID NO: 26377 - protein, 56 aa, Artificial Sequence; identical to SEQ ID NO: 25551
  Synthetic

SEQ ID NO: 26378 - protein, 59 aa, Artificial Sequence
  Synthetic
DDERRTLTELLKRMEDILEKVERTLKKLLDDSARMAEEVKKTLKELLERSEKVAEDVRK

SEQ ID NO: 26379 - protein, 56 aa, Artificial Sequence; identical to SEQ ID NO: 25551
  Synthetic

SEQ ID NO: 26380 - protein, 59 aa, Artificial Sequence; identical to SEQ ID NO: 26378
  Synthetic

SEQ ID NO: 26381 - protein, 56 aa, Artificial Sequence; identical to SEQ ID NO: 25555
  Synthetic

SEQ ID NO: 26382 - protein, 59 aa, Artificial Sequence; identical to SEQ ID NO: 25556
  Synthetic

SEQ ID NO: 26383 - protein, 56 aa, Artificial Sequence; identical to SEQ ID NO: 25555
  Synthetic

SEQ ID NO: 26384 - protein, 59 aa, Artificial Sequence; identical to SEQ ID NO: 25556
  Synthetic

SEQ ID NO: 26385 - protein, 60 aa, Artificial Sequence
  Synthetic
SKKELLEEVVRRAIELLKRHLEKLKRILEEIVRLLEEHLEKVERVLEAILSLLDDLLRRG

SEQ ID NO: 26386 - protein, 56 aa, Artificial Sequence
  Synthetic
EDKLKEIEDELRRLLEELRRLDKAIKDRLRELKKDLDEANRRIKETLKKLLREVEK

SEQ ID NO: 26387 - protein, 60 aa, Artificial Sequence; identical to SEQ ID NO: 26385
  Synthetic

SEQ ID NO: 26388 - protein, 56 aa, Artificial Sequence; identical to SEQ ID NO: 26386
  Synthetic

SEQ ID NO: 26389 - protein, 56 aa, Artificial Sequence
  Synthetic
SDLEELEALIRRLLKINEDLIRIIEDLIRKSLTLLKRIVDLIRELIREIEEIIRRT

SEQ ID NO: 26390 - protein, 55 aa, Artificial Sequence; identical to SEQ ID NO: 25580
  Synthetic

SEQ ID NO: 26391 - protein, 56 aa, Artificial Sequence; identical to SEQ ID NO: 26389
  Synthetic

SEQ ID NO: 26392 - protein, 55 aa, Artificial Sequence; identical to SEQ ID NO: 25580
  Synthetic

SEQ ID NO: 26393 - protein, 60 aa, Artificial Sequence
  Synthetic
SERDVLRELLERIKKLLETLIRIVEELVRRSEETIKRLAELNRRLIEEIRRIVEEVKKGV

SEQ ID NO: 26394 - protein, 55 aa, Artificial Sequence; identical to SEQ ID NO: 25606
  Synthetic

SEQ ID NO: 26395 - protein, 60 aa, Artificial Sequence; identical to SEQ ID NO: 26393
  Synthetic

SEQ ID NO: 26396 - protein, 55 aa, Artificial Sequence; identical to SEQ ID NO: 25606
  Synthetic

SEQ ID NO: 26397 - protein, 58 aa, Artificial Sequence
  Synthetic
SKEELVKEIDELNKRVNDLLEELLRKSEKLHKEILELLERLLREIISLLRRILEIVER

SEQ ID NO: 26398 - protein, 56 aa, Artificial Sequence
  Synthetic
EDELRRLLEDIERKIEALLRELKKESEEIRKRIRELLEDNRDKSRKIKKAIEELKK

SEQ ID NO: 26399 - protein, 58 aa, Artificial Sequence; identical to SEQ ID NO: 26397
  Synthetic

SEQ ID NO: 26400 - protein, 56 aa, Artificial Sequence; identical to SEQ ID NO: 26398
  Synthetic

SEQ ID NO: 26401 - protein, 60 aa, Artificial Sequence
  Synthetic
KEIEETLKELEDLNREMVETNRRVLEETRRLNKETVDRVKATLDELAKMLKKLVDDVRKG

SEQ ID NO: 26402 - protein, 55 aa, Artificial Sequence
  Synthetic
KAVEELEKALEEIKRRLKEVIDRYEDELRKLRKEYKEKIDKYERKLEEIERRERT

SEQ ID NO: 26403 - protein, 60 aa, Artificial Sequence; identical to SEQ ID NO: 26401
  Synthetic

SEQ ID NO: 26404 - protein, 55 aa, Artificial Sequence; identical to SEQ ID NO: 26402
  Synthetic

SEQ ID NO: 26405 - protein, 56 aa, Artificial Sequence; identical to SEQ ID NO: 25691
  Synthetic

SEQ ID NO: 26406 - protein, 56 aa, Artificial Sequence
  Synthetic
EDVVRALIEVIERLLRVAEEVIRRILKVNTELMRVDERSIRESLKAISEVLKVLDT

SEQ ID NO: 26407 - protein, 56 aa, Artificial Sequence; identical to SEQ ID NO: 25691
  Synthetic

SEQ ID NO: 26408 - protein, 56 aa, Artificial Sequence; identical to SEQ ID NO: 26406
  Synthetic

SEQ ID NO: 26409 - protein, 60 aa, Artificial Sequence
  Synthetic
DEDELIRKLLEDLKDIVRKILELIERDLRDIERVVRRIVKVIRDDLKKIKEVVDDIARGV

SEQ ID NO: 26410 - protein, 59 aa, Artificial Sequence
  Synthetic
SELADRIRKLIEDLERHTAKVLEDVKRAITELRKNSKDILEEVRKLIDELRKRIKEVED

SEQ ID NO: 26411 - protein, 60 aa, Artificial Sequence; identical to SEQ ID NO: 26409
  Synthetic

SEQ ID NO: 26412 - protein, 59 aa, Artificial Sequence; identical to SEQ ID NO: 26410
  Synthetic

SEQ ID NO: 26413 - protein, 59 aa, Artificial Sequence
  Synthetic
RDRDVLRKVKAEIEELVARIEKVSRDALSEVKRLLDENRKIAEDVLRLIESLLRKIRDT

SEQ ID NO: 26414 - protein, 59 aa, Artificial Sequence
  Synthetic
EEVVEELLRMLKRVAEEMKRVHDDLSRAVEKVVRDVVRVDKELLDELARILRRLEEVIT

SEQ ID NO: 26415 - protein, 59 aa, Artificial Sequence; identical to SEQ ID NO: 26413
  Synthetic

SEQ ID NO: 26416 - protein, 59 aa, Artificial Sequence; identical to SEQ ID NO: 26414
  Synthetic

SEQ ID NO: 26417 - protein, 56 aa, Artificial Sequence
  Synthetic
SKDEELARLLEELVERWRKIVEDLERDHRRLVKEIRELVERIRKKLEELVDRIRKN

SEQ ID NO: 26418 - protein, 58 aa, Artificial Sequence
  Synthetic
EEIRRILEELKRIVDDVLRIIARILKLLRDLTRRLAEVAKAVHKLLEELLRKLKEDTR

SEQ ID NO: 26419 - protein, 56 aa, Artificial Sequence; identical to SEQ ID NO: 26417
  Synthetic

SEQ ID NO: 26420 - protein, 58 aa, Artificial Sequence; identical to SEQ ID NO: 26418
  Synthetic

SEQ ID NO: 26421 - protein, 56 aa, Artificial Sequence
  Synthetic
SAAETVKRLAEESSERIRKIVEDDKRVADDSSRKIKELIEEIKRRVKELLDRIKGL

SEQ ID NO: 26422 - protein, 56 aa, Artificial Sequence
  Synthetic
KEAVIRLIEELVKLLEDVLRRLLEVNETLVELNKRVWDRLVRINEELAEVALRVAT

SEQ ID NO: 26423 - protein, 56 aa, Artificial Sequence; identical to SEQ ID NO: 26421
  Synthetic

SEQ ID NO: 26424 - protein, 56 aa, Artificial Sequence; identical to SEQ ID NO: 26422
  Synthetic

SEQ ID NO: 26425 - protein, 56 aa, Artificial Sequence
  Synthetic
SALETVKKLLEDSSEKIERIVEEDERVAKESSDRIRRLVEEDKRVADEILDLIEKI

SEQ ID NO: 26426 - protein, 56 aa, Artificial Sequence
  Synthetic
AEAVIKVIEKLIRANKRVWDALLKINEDLVRVNKTVWKELLRVNEKLARDLERVVK

SEQ ID NO: 26427 - protein, 56 aa, Artificial Sequence; identical to SEQ ID NO: 26425
  Synthetic

SEQ ID NO: 26428 - protein, 56 aa, Artificial Sequence; identical to SEQ ID NO: 26426
  Synthetic

SEQ ID NO: 26429 - protein, 60 aa, Artificial Sequence
  Synthetic
DEIETVLKRLAELIKESLDLLRETLDELRKIIEESKKSLEDVLRRLKELIDRLRRLAKEG

SEQ ID NO: 26430 - protein, 60 aa, Artificial Sequence
  Synthetic
ADELLRRVEEILKRLLELIRRIIEEHRKILERLLETHEDLIRKHEEILRRLLKAADEERQ

SEQ ID NO: 26431 - protein, 60 aa, Artificial Sequence; identical to SEQ ID NO: 26429
  Synthetic

SEQ ID NO: 26432 - protein, 60 aa, Artificial Sequence; identical to SEQ ID NO: 26430
  Synthetic

SEQ ID NO: 26433 - protein, 57 aa, Artificial Sequence
  Synthetic
SKEEKLKDDVRAVLEDLDRVLKELEKLSEDNLRELKRVLDRITDLHRRILDELRKGI

SEQ ID NO: 26434 - protein, 59 aa, Artificial Sequence
  Synthetic
SKAAEDILRVLEKLVKVSREAIKLILELSEHHVRVSTRIARLLLDVARKLAEVIKEAER

SEQ ID NO: 26435 - protein, 57 aa, Artificial Sequence; identical to SEQ ID NO: 26433
  Synthetic

SEQ ID NO: 26436 - protein, 59 aa, Artificial Sequence; identical to SEQ ID NO: 26434
  Synthetic

SEQ ID NO: 26437 - protein, 61 aa, Artificial Sequence
  Synthetic
SEIEDVIRRLRKILEDLERVSEKLLREIKKILDEARRLNEEVIKEIKRVLEDAVRVFRDGS

SEQ ID NO: 26438 - protein, 56 aa, Artificial Sequence; identical to SEQ ID NO: 25780
  Synthetic

SEQ ID NO: 26439 - protein, 60 aa, Artificial Sequence
  Synthetic
SEIEDVIRRLRKILEDLERVSEKLLREIKKILDEARRLNEEVIKEIKRVLEDAVRVFRDG

SEQ ID NO: 26440 - protein, 56 aa, Artificial Sequence; identical to SEQ ID NO: 25780
  Synthetic

SEQ ID NO: 26441 - protein, 60 aa, Artificial Sequence
  Synthetic
SREEIVATLEDLARKILEVVKKLAKEIEDAWREIERAVREILKRLEELWREIEDVVRKKV

SEQ ID NO: 26442 - protein, 59 aa, Artificial Sequence
  Synthetic
EEAVKELVELLEEILERNTRVIKEIIDLLRTVIRIHEKIVEDLIKLLEELLRRLEEATR

SEQ ID NO: 26443 - protein, 60 aa, Artificial Sequence; identical to SEQ ID NO: 26441
  Synthetic

SEQ ID NO: 26444 - protein, 59 aa, Artificial Sequence; identical to SEQ ID NO: 26442
  Synthetic

SEQ ID NO: 26445 - protein, 58 aa, Artificial Sequence; identical to SEQ ID NO: 25783
  Synthetic

SEQ ID NO: 26446 - protein, 59 aa, Artificial Sequence; identical to SEQ ID NO: 25784
  Synthetic

SEQ ID NO: 26447 - protein, 58 aa, Artificial Sequence; identical to SEQ ID NO: 25783
  Synthetic

SEQ ID NO: 26448 - protein, 59 aa, Artificial Sequence; identical to SEQ ID NO: 25784
  Synthetic

SEQ ID NO: 26449 - protein, 55 aa, Artificial Sequence
  Synthetic
SKEERLREVAEKHKKDLEDIVKRVDEAAKETARRLEEILKRLEEVLKKILDDLEK

SEQ ID NO: 26450 - protein, 55 aa, Artificial Sequence; identical to SEQ ID NO: 25794
  Synthetic

SEQ ID NO: 26451 - protein, 55 aa, Artificial Sequence; identical to SEQ ID NO: 26449
  Synthetic

SEQ ID NO: 26452 - protein, 55 aa, Artificial Sequence; identical to SEQ ID NO: 25794
  Synthetic

SEQ ID NO: 26453 - protein, 56 aa, Artificial Sequence; identical to SEQ ID NO: 25819
  Synthetic

SEQ ID NO: 26454 - protein, 62 aa, Artificial Sequence
  Synthetic
EDAVRKIAKIIEELKRLLEDLARDTRRVIEEAKRLLKEWRDRNKEVADTLKKLLEDLIRKIR

SEQ ID NO: 26455 - protein, 56 aa, Artificial Sequence; identical to SEQ ID NO: 25819
  Synthetic

SEQ ID NO: 26456 - protein, 62 aa, Artificial Sequence; identical to SEQ ID NO: 26454
  Synthetic

SEQ ID NO: 26457 - protein, 61 aa, Artificial Sequence
  Synthetic
SEDELLEKIVRKLAEAVKRIEEELRKSKREIERLVKEIKEKLEDSLARVKETLDRIRETRK

SEQ ID NO: 26458 - protein, 56 aa, Artificial Sequence
  Synthetic
LEELLRLLKEVIERSIESLERLLELILRVLEYSVASLEELLRRLLEVIKRIVDTTK

SEQ ID NO: 26459 - protein, 61 aa, Artificial Sequence; identical to SEQ ID NO: 26457
  Synthetic

SEQ ID NO: 26460 - protein, 56 aa, Artificial Sequence; identical to SEQ ID NO: 26458
  Synthetic

SEQ ID NO: 26461 - protein, 59 aa, Artificial Sequence
  Synthetic
DEDEIAEELKRLLREVEEASKEIVRRMRELAREANKASEDILRTLEKLLEELRRRVEES

SEQ ID NO: 26462 - protein, 56 aa, Artificial Sequence; identical to SEQ ID NO: 25832
  Synthetic

SEQ ID NO: 26463 - protein, 59 aa, Artificial Sequence; identical to SEQ ID NO: 26461
  Synthetic

SEQ ID NO: 26464 - protein, 56 aa, Artificial Sequence; identical to SEQ ID NO: 25832
  Synthetic

SEQ ID NO: 26465 - protein, 60 aa, Artificial Sequence
  Synthetic
DAEEKAKKIEDVARRYAEEVKRVLDDLERLLRESEEEVERIVRKLEKLARDLEERVREGT

SEQ ID NO: 26466 - protein, 59 aa, Artificial Sequence; identical to SEQ ID NO: 25854
  Synthetic

SEQ ID NO: 26467 - protein, 60 aa, Artificial Sequence; identical to SEQ ID NO: 26465
  Synthetic

SEQ ID NO: 26468 - protein, 59 aa, Artificial Sequence; identical to SEQ ID NO: 25854
  Synthetic

SEQ ID NO: 26469 - protein, 59 aa, Artificial Sequence; identical to SEQ ID NO: 25887
  Synthetic

SEQ ID NO: 26470 - protein, 55 aa, Artificial Sequence
  Synthetic
EEALDDLRRLVKELADKLRKLLKDYKDLLKELKDEAKKLLDDYARLIEELEKKAR

SEQ ID NO: 26471 - protein, 59 aa, Artificial Sequence; identical to SEQ ID NO: 25887
  Synthetic

SEQ ID NO: 26472 - protein, 55 aa, Artificial Sequence; identical to SEQ ID NO: 26470
  Synthetic

SEQ ID NO: 26473 - protein, 60 aa, Artificial Sequence
  Synthetic
SREELLDRILEAIAKILEDLKRLIDENLARLEEVVRELERIIDRNLKLIREILDELKKGS

SEQ ID NO: 26474 - protein, 59 aa, Artificial Sequence; identical to SEQ ID NO: 25896
  Synthetic

SEQ ID NO: 26475 - protein, 60 aa, Artificial Sequence; identical to SEQ ID NO: 26473
  Synthetic

SEQ ID NO: 26476 - protein, 59 aa, Artificial Sequence; identical to SEQ ID NO: 25896
  Synthetic

SEQ ID NO: 26477 - protein, 61 aa, Artificial Sequence; identical to SEQ ID NO: 25897
  Synthetic

SEQ ID NO: 26478 - protein, 60 aa, Artificial Sequence; identical to SEQ ID NO: 25898
  Synthetic

SEQ ID NO: 26479 - protein, 61 aa, Artificial Sequence; identical to SEQ ID NO: 25897
  Synthetic

SEQ ID NO: 26480 - protein, 60 aa, Artificial Sequence; identical to SEQ ID NO: 25898
  Synthetic

SEQ ID NO: 26481 - protein, 60 aa, Artificial Sequence
  Synthetic
DREKSVRDIEEDLKRVLDKLRRRVETSKEELKKVLKADKENADELEKTLRDVVRELDRGI

SEQ ID NO: 26482 - protein, 56 aa, Artificial Sequence
  Synthetic
SEVAKELDEVIKRLLDNLKENTDRLKEVIDRNLADLRDLAEELRAVIERLLEDARR

SEQ ID NO: 26483 - protein, 60 aa, Artificial Sequence; identical to SEQ ID NO: 26481
  Synthetic

SEQ ID NO: 26484 - protein, 56 aa, Artificial Sequence; identical to SEQ ID NO: 26482
  Synthetic

SEQ ID NO: 26485 - protein, 59 aa, Artificial Sequence
  Synthetic
SLEEITKRLLELVEENLARHEEILRELLELAKRLAKEDRDILEEVLKLIEELLKLLEDN

SEQ ID NO: 26486 - protein, 60 aa, Artificial Sequence; identical to SEQ ID NO: 25950
  Synthetic

SEQ ID NO: 26487 - protein, 59 aa, Artificial Sequence; identical to SEQ ID NO: 26485
  Synthetic

SEQ ID NO: 26488 - protein, 60 aa, Artificial Sequence; identical to SEQ ID NO: 25950
  Synthetic

SEQ ID NO: 26489 - protein, 60 aa, Artificial Sequence
  Synthetic
SAEEAVEKLVRIARAIVKINEDLSREVVRILREIVRLNEETTRLLVEIAREVVKVVEDGG

SEQ ID NO: 26490 - protein, 59 aa, Artificial Sequence
  Synthetic
EELLRRLEELRKRLEKVLDDSAKELEKLKRELERLLEESRRKLEKLKRDLERVLEETRR

SEQ ID NO: 26491 - protein, 60 aa, Artificial Sequence; identical to SEQ ID NO: 26489
  Synthetic

SEQ ID NO: 26492 - protein, 59 aa, Artificial Sequence; identical to SEQ ID NO: 26490
  Synthetic

SEQ ID NO: 26493 - protein, 60 aa, Artificial Sequence
  Synthetic
REDEVLRDIERLLREIEEKIRRILEESTAELRKVEEEVKRIIERTKRELKAIKEDVERKG

SEQ ID NO: 26494 - protein, 56 aa, Artificial Sequence
  Synthetic
EDLLEKIKRVIREHIKALEKLARDLKEILRRHIEALKELARDLAEVIRKLLEDVKR

SEQ ID NO: 26495 - protein, 60 aa, Artificial Sequence; identical to SEQ ID NO: 26493
  Synthetic

SEQ ID NO: 26496 - protein, 56 aa, Artificial Sequence; identical to SEQ ID NO: 26494
  Synthetic

SEQ ID NO: 26497 - protein, 58 aa, Artificial Sequence
  Synthetic
SREDLLRSLAELIETILRKSSELLDRLLKLVREHSETSERLIRELKKILEDILKLIKG

SEQ ID NO: 26498 - protein, 56 aa, Artificial Sequence
  Synthetic
EKELRRIAEAVERVLRDHKAKNDKILRDVEEVLRRHLEELARILKDVKKVLDEARK

SEQ ID NO: 26499 - protein, 58 aa, Artificial Sequence; identical to SEQ ID NO: 26497
  Synthetic

SEQ ID NO: 26500 - protein, 56 aa, Artificial Sequence; identical to SEQ ID NO: 26498
  Synthetic

SEQ ID NO: 26501 - protein, 60 aa, Artificial Sequence; identical to SEQ ID NO: 25989
  Synthetic

SEQ ID NO: 26502 - protein, 56 aa, Artificial Sequence; identical to SEQ ID NO: 25990
  Synthetic

SEQ ID NO: 26503 - protein, 60 aa, Artificial Sequence; identical to SEQ ID NO: 25989
  Synthetic

SEQ ID NO: 26504 - protein, 56 aa, Artificial Sequence; identical to SEQ ID NO: 25990
  Synthetic

SEQ ID NO: 26505 - protein, 61 aa, Artificial Sequence
  Synthetic
SKEEDVRRLIEELVRELRRILEENRRMLKELVEKLEEVLRRSEEVWRRLAKELDELLKEGN

SEQ ID NO: 26506 - protein, 59 aa, Artificial Sequence; identical to SEQ ID NO: 25992
  Synthetic

SEQ ID NO: 26507 - protein, 61 aa, Artificial Sequence; identical to SEQ ID NO: 26505
  Synthetic

SEQ ID NO: 26508 - protein, 59 aa, Artificial Sequence; identical to SEQ ID NO: 25992
  Synthetic

SEQ ID NO: 26509 - protein, 59 aa, Artificial Sequence
  Synthetic
SEKEAIKEVAELLKALIDDLLRLLKEDVDTARRVLDEIKKLLEENESIAREVLRRLREG

SEQ ID NO: 26510 - protein, 56 aa, Artificial Sequence
  Synthetic
ETDLDRIVKEMEKVLEDSIRELEKLVKRLEDILRESEKALRDLLSELAKVLEEVRT

SEQ ID NO: 26511 - protein, 59 aa, Artificial Sequence; identical to SEQ ID NO: 26509
  Synthetic

SEQ ID NO: 26512 - protein, 56 aa, Artificial Sequence; identical to SEQ ID NO: 26510
  Synthetic

SEQ ID NO: 26513 - protein, 58 aa, Artificial Sequence; identical to SEQ ID NO: 26001
  Synthetic

SEQ ID NO: 26514 - protein, 56 aa, Artificial Sequence
  Synthetic
EDTVRELTELVRRLLKRVEELLKRSLEILRELIKAIADAIKESLDILDRLLREVAR

SEQ ID NO: 26515 - protein, 58 aa, Artificial Sequence; identical to SEQ ID NO: 26001
  Synthetic

SEQ ID NO: 26516 - protein, 56 aa, Artificial Sequence; identical to SEQ ID NO: 26514
  Synthetic

SEQ ID NO: 26517 - protein, 59 aa, Artificial Sequence
  Synthetic
SEAERLADEVRKAVKKSEEDNETLVREVEKAVRELKKNNKTWVDEVRKLMKRLVDLLRD

SEQ ID NO: 26518 - protein, 60 aa, Artificial Sequence; identical to SEQ ID NO: 26024
  Synthetic

SEQ ID NO: 26519 - protein, 59 aa, Artificial Sequence; identical to SEQ ID NO: 26517
  Synthetic

SEQ ID NO: 26520 - protein, 60 aa, Artificial Sequence; identical to SEQ ID NO: 26024
  Synthetic

SEQ ID NO: 26521 - protein, 61 aa, Artificial Sequence
  Synthetic
SEKDEVTRRIRELLKEAEETNREAIERIKRLLDRVREAVEEVAKRSEELLRRLKKVLDRGL

SEQ ID NO: 26522 - protein, 57 aa, Artificial Sequence
  Synthetic
KEDLLREIARILAESLRLIRELLKEIEKIVKEIIELLERLNDELRKIIEAILETTKK

SEQ ID NO: 26523 - protein, 61 aa, Artificial Sequence; identical to SEQ ID NO: 26521
  Synthetic

SEQ ID NO: 26524 - protein, 57 aa, Artificial Sequence; identical to SEQ ID NO: 26522
  Synthetic

SEQ ID NO: 26525 - protein, 59 aa, Artificial Sequence
  Synthetic
SAEDLVRRVKDLVDKLEDKLRKVVRTNERLWEEIRKRLEELVRRNKELWDALVEKLKAG

SEQ ID NO: 26526 - protein, 56 aa, Artificial Sequence
  Synthetic
IRVLVELVRRHNKVLKELVEELEKLVRDHNRVVEEVVRELVELLSRAVEVIKEVVK

SEQ ID NO: 26527 - protein, 59 aa, Artificial Sequence; identical to SEQ ID NO: 26525
  Synthetic

SEQ ID NO: 26528 - protein, 56 aa, Artificial Sequence; identical to SEQ ID NO: 26526
  Synthetic

SEQ ID NO: 26529 - protein, 59 aa, Artificial Sequence
  Synthetic
SEKELVDDIRRILEEILRLLRSLLEEVIRLLEENEKLVRRHLKTVIDILRRVAKLLDEN

SEQ ID NO: 26530 - protein, 56 aa, Artificial Sequence; identical to SEQ ID NO: 26068
  Synthetic

SEQ ID NO: 26531 - protein, 59 aa, Artificial Sequence; identical to SEQ ID NO: 26529
  Synthetic

SEQ ID NO: 26532 - protein, 56 aa, Artificial Sequence; identical to SEQ ID NO: 26068
  Synthetic

SEQ ID NO: 26533 - protein, 62 aa, Artificial Sequence
  Synthetic
DEERLAEELERVLDRNRKLLEEALRELRRVIEENRKSVKRLLDELKRVLDELLKVLRELSRG

SEQ ID NO: 26534 - protein, 56 aa, Artificial Sequence
  Synthetic
EEDVERAVKEIRDRLRKLLEDYERAVRRLEDKLRRVRERYEAVLKRIKDKLEETKR

SEQ ID NO: 26535 - protein, 62 aa, Artificial Sequence; identical to SEQ ID NO: 26533
  Synthetic

SEQ ID NO: 26536 - protein, 56 aa, Artificial Sequence; identical to SEQ ID NO: 26534
  Synthetic

SEQ ID NO: 26537 - protein, 61 aa, Artificial Sequence
  Synthetic
SRVEELKKLIEDILRISREVVERIARVAEDIHRINRRVLDDLRKLIEDILRTVEEILARKV

SEQ ID NO: 26538 - protein, 55 aa, Artificial Sequence; identical to SEQ ID NO: 26076
  Synthetic

SEQ ID NO: 26539 - protein, 62 aa, Artificial Sequence
  Synthetic
SRVEELKKLIEDILRISREVVERIARVAEDIHRINRRVLDDLRKLIEDILRTVEEILARKVS

SEQ ID NO: 26540 - protein, 55 aa, Artificial Sequence; identical to SEQ ID NO: 26076
  Synthetic

SEQ ID NO: 26541 - protein, 60 aa, Artificial Sequence
  Synthetic
DEDRRLEDAVAKLRKEHADIMKKLDDIMRELDEDHARIKERLDRILEELKALLTRVLRET

SEQ ID NO: 26542 - protein, 54 aa, Artificial Sequence
  Synthetic
EIERIIRRVIEVIREILDLVRKVNKKALRVIEEILEDLARVNKKAVDAIDELAK

SEQ ID NO: 26543 - protein, 60 aa, Artificial Sequence; identical to SEQ ID NO: 26541
  Synthetic

SEQ ID NO: 26544 - protein, 54 aa, Artificial Sequence; identical to SEQ ID NO: 26542
  Synthetic

SEQ ID NO: 26545 - protein, 61 aa, Artificial Sequence
  Synthetic
DEVEELLKRVRELLKASEELVRKILEDVKRLLERSIEEVEDLLRKVEELLKRLLDLVERGG

SEQ ID NO: 26546 - protein, 56 aa, Artificial Sequence
  Synthetic
EDLIRDVDRVLKEIMDLLRDLVRRTKELLEELLRLLEELVRAHKELVRSILDEIRK

SEQ ID NO: 26547 - protein, 61 aa, Artificial Sequence; identical to SEQ ID NO: 26545
  Synthetic

SEQ ID NO: 26548 - protein, 56 aa, Artificial Sequence; identical to SEQ ID NO: 26546
  Synthetic

SEQ ID NO: 26549 - protein, 59 aa, Artificial Sequence
  Synthetic
SEAEELLRELEELLKKSEKVLEDLLRKNAELIKDSKARLDEVRRKVEKLAEEVEEVIRR

SEQ ID NO: 26550 - protein, 56 aa, Artificial Sequence
  Synthetic
KDAVRKLIEELKKLLEDLVEHHERLLKEDHERLKALLDHHRELLKTVLTILRETAK

SEQ ID NO: 26551 - protein, 59 aa, Artificial Sequence; identical to SEQ ID NO: 26549
  Synthetic

SEQ ID NO: 26552 - protein, 56 aa, Artificial Sequence; identical to SEQ ID NO: 26550
  Synthetic

SEQ ID NO: 26553 - protein, 59 aa, Artificial Sequence
  Synthetic
DEEELLRRVTEELKRLLDEARKLHEDVKRELEKLLKENDDLLADVKRKLESLLEALKRG

SEQ ID NO: 26554 - protein, 57 aa, Artificial Sequence
  Synthetic
ADKLLERIRALLETLLEVLKRDNEEIKRILEELLRVAEENLRRIKEIIDRLLDATRR

SEQ ID NO: 26555 - protein, 59 aa, Artificial Sequence; identical to SEQ ID NO: 26553
  Synthetic

SEQ ID NO: 26556 - protein, 57 aa, Artificial Sequence; identical to SEQ ID NO: 26554
  Synthetic

SEQ ID NO: 26557 - protein, 59 aa, Artificial Sequence
  Synthetic
DAEEVVKRLADVLRENDETIRKVVEDLVRIAEENDRLWKKLVEDIAEILRRIVELLRRG

SEQ ID NO: 26558 - protein, 59 aa, Artificial Sequence
  Synthetic
EDVKRALEELVSRLRKLLEDVKKASEDIVREVERIVRELAKRSDEILKKLEDIVEKLRE

SEQ ID NO: 26559 - protein, 59 aa, Artificial Sequence; identical to SEQ ID NO: 26557
  Synthetic

SEQ ID NO: 26560 - protein, 59 aa, Artificial Sequence; identical to SEQ ID NO: 26558
  Synthetic

SEQ ID NO: 26561 - protein, 56 aa, Artificial Sequence
  Synthetic
DKDKRLEELLKRLKELNDKTFEELERILEELKRANEASLREAERILEELRARIEGG

SEQ ID NO: 26562 - protein, 59 aa, Artificial Sequence; identical to SEQ ID NO: 26128
  Synthetic

SEQ ID NO: 26563 - protein, 56 aa, Artificial Sequence; identical to SEQ ID NO: 26561
  Synthetic

SEQ ID NO: 26564 - protein, 59 aa, Artificial Sequence; identical to SEQ ID NO: 26128
  Synthetic

SEQ ID NO: 26565 - protein, 56 aa, Artificial Sequence
  Synthetic
SKEETLKRLLDELEKRNRETVERLERLLKELEDRNRASLEELEAVLEELERKIEES

SEQ ID NO: 26566 - protein, 59 aa, Artificial Sequence
  Synthetic
EEVKDIVRAMEEVIRRLIEILRRDVELNLDVAKKLLELLKEDSKLNLDVARELLELLDR

SEQ ID NO: 26567 - protein, 56 aa, Artificial Sequence; identical to SEQ ID NO: 26565
  Synthetic

SEQ ID NO: 26568 - protein, 59 aa, Artificial Sequence; identical to SEQ ID NO: 26566
  Synthetic

SEQ ID NO: 26569 - protein, 57 aa, Artificial Sequence
  Synthetic
DEEETLRRLLERKVELAKEYLDVSKEVIDRTTKLLDEYLKTSKRIVDATVELLERGD

SEQ ID NO: 26570 - protein, 60 aa, Artificial Sequence
  Synthetic
SREALEEARRRLEELLRELNEITKDLEAKLEKLLRDLNELTKALEEELKRLLDELKKRTD

SEQ ID NO: 26571 - protein, 57 aa, Artificial Sequence; identical to SEQ ID NO: 26569
  Synthetic

SEQ ID NO: 26572 - protein, 60 aa, Artificial Sequence; identical to SEQ ID NO: 26570
  Synthetic

SEQ ID NO: 26573 - protein, 56 aa, Artificial Sequence
  Synthetic
SEAERTKESLKKVLKALVDLNRELLRKLEENMRELTKLNEEVKRALKEVLDKVREG

SEQ ID NO: 26574 - protein, 59 aa, Artificial Sequence
  Synthetic
EEIRKIVEEILKEIKELADRYREEVRKSKDKLRSILEDYKRKVDELKERLRELIEEVET

SEQ ID NO: 26575 - protein, 56 aa, Artificial Sequence; identical to SEQ ID NO: 26573
  Synthetic

SEQ ID NO: 26576 - protein, 59 aa, Artificial Sequence; identical to SEQ ID NO: 26574
  Synthetic

SEQ ID NO: 26577 - protein, 61 aa, Artificial Sequence
  Synthetic
SEVEDILRRLAELNKRLIDKLRELIDRIARLNEELLRVVEDILSRLKRLADELIRVVRERG

SEQ ID NO: 26578 - protein, 56 aa, Artificial Sequence
  Synthetic
DEDLKRLLEKLKEDVERVLKEVRDRTAESLKHLEDVIRELEKKTEDSLRHMEERRK

SEQ ID NO: 26579 - protein, 61 aa, Artificial Sequence; identical to SEQ ID NO: 26577
  Synthetic

SEQ ID NO: 26580 - protein, 56 aa, Artificial Sequence; identical to SEQ ID NO: 26578
  Synthetic

SEQ ID NO: 26581 - protein, 60 aa, Artificial Sequence
  Synthetic
DEERIIKTLEDINAKLVEDIKRILDKVAELNERLADAIRKILEETKRILEATTRKVRKDG

SEQ ID NO: 26582 - protein, 56 aa, Artificial Sequence
  Synthetic
KDTLRTVEKLVEDVKRRLDKLLEDYKRLIEEVKKELDKLLKEYEDALREIKKRIDE

SEQ ID NO: 26583 - protein, 60 aa, Artificial Sequence; identical to SEQ ID NO: 26581
  Synthetic

SEQ ID NO: 26584 - protein, 56 aa, Artificial Sequence; identical to SEQ ID NO: 26582
  Synthetic

SEQ ID NO: 26585 - protein, 58 aa, Artificial Sequence; identical to SEQ ID NO: 26193
  Synthetic

SEQ ID NO: 26586 - protein, 56 aa, Artificial Sequence
  Synthetic
REEVKRVLEEARDELRRLLEEYKAIIEELERELERLLREHREVIRRIKEEIDKSSK

SEQ ID NO: 26587 - protein, 58 aa, Artificial Sequence; identical to SEQ ID NO: 26193
  Synthetic

SEQ ID NO: 26588 - protein, 56 aa, Artificial Sequence; identical to SEQ ID NO: 26586
  Synthetic

SEQ ID NO: 26589 - protein, 59 aa, Artificial Sequence; identical to SEQ ID NO: 26195
  Synthetic

SEQ ID NO: 26590 - protein, 56 aa, Artificial Sequence; identical to SEQ ID NO: 26196
  Synthetic

SEQ ID NO: 26591 - protein, 59 aa, Artificial Sequence; identical to SEQ ID NO: 26195
  Synthetic

SEQ ID NO: 26592 - protein, 56 aa, Artificial Sequence; identical to SEQ ID NO: 26196
  Synthetic

SEQ ID NO: 26593 - protein, 60 aa, Artificial Sequence
  Synthetic
SLEEIVKKLEDLNKKAVEILRRVLEEHEKLVEKVKKVLRDVLRLLEKVVREVIETLKKGD

SEQ ID NO: 26594 - protein, 56 aa, Artificial Sequence
  Synthetic
EEVLRKLKEIIKELKDRLKKLLDDYERIIDELRAELERVLREYEKILEDLRKELED

SEQ ID NO: 26595 - protein, 60 aa, Artificial Sequence; identical to SEQ ID NO: 26593
  Synthetic

SEQ ID NO: 26596 - protein, 56 aa, Artificial Sequence; identical to SEQ ID NO: 26594
  Synthetic

SEQ ID NO: 26597 - protein, 59 aa, Artificial Sequence
  Synthetic
SADEALEELVRRLLEVLKTVLERTKELSRDDLRVVKEVLRIIEELVKRLLKVIRDGLDD

SEQ ID NO: 26598 - protein, 59 aa, Artificial Sequence
  Synthetic
EDVRRDIERLLEELKRRVERLLEDIERLLAELEKLNEDVLRENKALLEDLERRVRERKK

SEQ ID NO: 26599 - protein, 59 aa, Artificial Sequence; identical to SEQ ID NO: 26597
  Synthetic

SEQ ID NO: 26600 - protein, 59 aa, Artificial Sequence; identical to SEQ ID NO: 26598
  Synthetic

SEQ ID NO: 26601 - protein, 59 aa, Artificial Sequence
  Synthetic
REVEEIERRLRELVRRSDELVRTVAEELEKLVRRNKKLVEDVMKRLRDLVERLRELVDA

SEQ ID NO: 26602 - protein, 58 aa, Artificial Sequence
  Synthetic
SGSKEVLDILERAVEVVRRVIKALKEVLERHVDATREVIERVKRVNKRLLEAVREVVT

SEQ ID NO: 26603 - protein, 58 aa, Artificial Sequence
  Synthetic
GVPEEIDRELKRVVEELRRLHEEIKERLDDVARRSEEELRRIIKKLKEVVKEIRKKLK

SEQ ID NO: 26604 - protein, 55 aa, Artificial Sequence
  Synthetic
DLLRKLEEELRRIKEKLRKALEELEREHRELEKELDKLHDESRKEHERIEEELRR

SEQ ID NO: 26605 - protein, 57 aa, Artificial Sequence
  Synthetic
DEDLLEKIKRVIREHIKALEKLARDLKEILRRHIEALKELARDLAEVIRKLLEDVKR

SEQ ID NO: 26606 - protein, 54 aa, Artificial Sequence
  Synthetic
DLERLRRKVEELEDRLRRLLEKLARDSAELMRELERILDRYARESEELDRRLAE

SEQ ID NO: 26607 - protein, 54 aa, Artificial Sequence
  Synthetic
DLEDILRKNLDRLRKLLERLREILRENLEALKKTLKRLEDVVREILEDLKRERK

SEQ ID NO: 26608 - protein, 54 aa, Artificial Sequence; identical to SEQ ID NO: 26606
  Synthetic

SEQ ID NO: 26609 - protein, 58 aa, Artificial Sequence; identical to SEQ ID NO: 26602
  Synthetic

SEQ ID NO: 26610 - protein, 54 aa, Artificial Sequence; identical to SEQ ID NO: 26606
  Synthetic

SEQ ID NO: 26611 - protein, 58 aa, Artificial Sequence
  Synthetic
RLIEEVVRLLRENLDVVRRILEALAKLIKELLEALEEVLRRNKELIRELLRVLDEALK

SEQ ID NO: 26612 - protein, 55 aa, Artificial Sequence
  Synthetic
DIVRAMEEVIRRLIEILRRDVELNLDVAKKLLELLKEDSKLNLDVARELLELLDR

SEQ ID NO: 26613 - protein, 55 aa, Artificial Sequence; identical to SEQ ID NO: 26612
  Synthetic

SEQ ID NO: 26614 - protein, 58 aa, Artificial Sequence; identical to SEQ ID NO: 26611
  Synthetic

SEQ ID NO: 26615 - protein, 58 aa, Artificial Sequence; identical to SEQ ID NO: 26611
  Synthetic

SEQ ID NO: 26616 - protein, 55 aa, Artificial Sequence; identical to SEQ ID NO: 26604
  Synthetic

SEQ ID NO: 26617 - protein, 55 aa, Artificial Sequence; identical to SEQ ID NO: 26604
  Synthetic

SEQ ID NO: 26618 - protein, 58 aa, Artificial Sequence
  Synthetic
ELAREVERVIKELLDKSKEILERIERAIDELLKVSEEILKLSEDASEELLKILREFAK

SEQ ID NO: 26619 - protein, 58 aa, Artificial Sequence
  Synthetic
DVKDIIRTILEVARDLLRLLEEDSRTNSEVVKRLLDLLREDSKANSEVVKRLLDVLRE

SEQ ID NO: 26620 - protein, 54 aa, Artificial Sequence; identical to SEQ ID NO: 26606
  Synthetic

SEQ ID NO: 26621 - protein, 54 aa, Artificial Sequence; identical to SEQ ID NO: 26606
  Synthetic

SEQ ID NO: 26622 - protein, 58 aa, Artificial Sequence; identical to SEQ ID NO: 26611
  Synthetic

SEQ ID NO: 26623 - protein, 54 aa, Artificial Sequence; identical to SEQ ID NO: 26607
  Synthetic

SEQ ID NO: 26624 - protein, 55 aa, Artificial Sequence; identical to SEQ ID NO: 26604
  Synthetic

SEQ ID NO: 26625 - protein, 57 aa, Artificial Sequence; identical to SEQ ID NO: 26605
  Synthetic

SEQ ID NO: 26626 - protein, 58 aa, Artificial Sequence
  Synthetic
ELVRIAIEVLKRLLEIIEELVRLNNEILERLLKIVRELHKDNIKILEDLLRIIEEVLR

SEQ ID NO: 26627 - protein, 58 aa, Artificial Sequence; identical to SEQ ID NO: 26626
  Synthetic

SEQ ID NO: 26628 - protein, 58 aa, Artificial Sequence
  Synthetic
RLARLLKALADKLIRVLEEILKINEELNRKIIKFARENLERNRRVNKKVIEVLREAAR

SEQ ID NO: 26629 - protein, 54 aa, Artificial Sequence; identical to SEQ ID NO: 26606
  Synthetic

SEQ ID NO: 26630 - protein, 58 aa, Artificial Sequence; identical to SEQ ID NO: 26626
  Synthetic

SEQ ID NO: 26631 - protein, 58 aa, Artificial Sequence; identical to SEQ ID NO: 26626
  Synthetic

SEQ ID NO: 26632 - protein, 55 aa, Artificial Sequence; identical to SEQ ID NO: 26612
  Synthetic

SEQ ID NO: 26633 - protein, 58 aa, Artificial Sequence
  Synthetic
RKIAKIIEELKRLLEDLARDTRRVIEEAKRLLKEWRDRNKEVADTLKKLLEDLIRKIR

SEQ ID NO: 26634 - protein, 55 aa, Artificial Sequence; identical to SEQ ID NO: 26604
  Synthetic

SEQ ID NO: 26635 - protein, 55 aa, Artificial Sequence; identical to SEQ ID NO: 26604
  Synthetic

SEQ ID NO: 26636 - protein, 58 aa, Artificial Sequence; identical to SEQ ID NO: 26633
  Synthetic

SEQ ID NO: 26637 - protein, 58 aa, Artificial Sequence; identical to SEQ ID NO: 26626
  Synthetic

SEQ ID NO: 26638 - protein, 57 aa, Artificial Sequence
  Synthetic
TVRRLREALKKLEDDLRKIERDAEREYKKLKDELEELTERYRREIRKLKEELKADRK

SEQ ID NO: 26639 - protein, 58 aa, Artificial Sequence
  Synthetic
DEAERRRRELKDKLDRLREEHEEVKRRLEEELTRLRETHKKIEKELREALKRVRDRST

SEQ ID NO: 26640 - protein, 58 aa, Artificial Sequence; identical to SEQ ID NO: 26639
  Synthetic

SEQ ID NO: 26641 - protein, 54 aa, Artificial Sequence; identical to SEQ ID NO: 26607
  Synthetic

SEQ ID NO: 26642 - protein, 54 aa, Artificial Sequence; identical to SEQ ID NO: 26606
  Synthetic

SEQ ID NO: 26643 - protein, 58 aa, Artificial Sequence; identical to SEQ ID NO: 26639
  Synthetic

SEQ ID NO: 26644 - protein, 58 aa, Artificial Sequence; identical to SEQ ID NO: 26639
  Synthetic

SEQ ID NO: 26645 - protein, 58 aa, Artificial Sequence; identical to SEQ ID NO: 26639
  Synthetic

SEQ ID NO: 26646 - protein, 56 aa, Artificial Sequence
  Synthetic
DKAVEELEKALEEIKRRLKEVIDRYEDELRKLRKEYKEKIDKYERKLEEIERRERT

SEQ ID NO: 26647 - protein, 58 aa, Artificial Sequence
  Synthetic
DVKRALEELVSRLRKLLEDVKKASEDIVREVERIVRELAKRSDEILKKLEDIVEKLRE

SEQ ID NO: 26648 - protein, 58 aa, Artificial Sequence; identical to SEQ ID NO: 26647
  Synthetic

SEQ ID NO: 26649 - protein, 58 aa, Artificial Sequence; identical to SEQ ID NO: 26639
  Synthetic

SEQ ID NO: 26650 - protein, 58 aa, Artificial Sequence; identical to SEQ ID NO: 26647
  Synthetic

SEQ ID NO: 26651 - protein, 58 aa, Artificial Sequence
  Synthetic
EVKRRLEEKERRIRTRYEELRRRLRKRVKDYEDKLREIEKKVRRDAERIEEELERAKK

SEQ ID NO: 26652 - protein, 58 aa, Artificial Sequence; identical to SEQ ID NO: 26639
  Synthetic

SEQ ID NO: 26653 - protein, 58 aa, Artificial Sequence
  Synthetic
KIAEEIERELEELRRMIKRLHEDLERKLKESEDELREIEARLEEKIRRLEEKLERKRR

SEQ ID NO: 26654 - protein, 58 aa, Artificial Sequence; identical to SEQ ID NO: 26653
  Synthetic

SEQ ID NO: 26655 - protein, 56 aa, Artificial Sequence; identical to SEQ ID NO: 26646
  Synthetic

SEQ ID NO: 26656 - protein, 58 aa, Artificial Sequence; identical to SEQ ID NO: 26653
  Synthetic

SEQ ID NO: 26657 - protein, 58 aa, Artificial Sequence; identical to SEQ ID NO: 26626
  Synthetic

SEQ ID NO: 26658 - protein, 55 aa, Artificial Sequence; identical to SEQ ID NO: 26076
  Synthetic

SEQ ID NO: 26659 - protein, 58 aa, Artificial Sequence; identical to SEQ ID NO: 26647
  Synthetic

SEQ ID NO: 26660 - protein, 58 aa, Artificial Sequence; identical to SEQ ID NO: 26639
  Synthetic

SEQ ID NO: 26661 - protein, 58 aa, Artificial Sequence; identical to SEQ ID NO: 26639
  Synthetic

SEQ ID NO: 26662 - protein, 58 aa, Artificial Sequence
  Synthetic
TLREVVRKVLEEAKRLLDELEEVHKRVKKELEDIIEENRRVVKRVRDELREIKRELDE

SEQ ID NO: 26663 - protein, 58 aa, Artificial Sequence; identical to SEQ ID NO: 26647
  Synthetic

SEQ ID NO: 26664 - protein, 58 aa, Artificial Sequence; identical to SEQ ID NO: 26647
  Synthetic

SEQ ID NO: 26665 - protein, 58 aa, Artificial Sequence; identical to SEQ ID NO: 26639
  Synthetic

SEQ ID NO: 26666 - protein, 58 aa, Artificial Sequence; identical to SEQ ID NO: 26639
  Synthetic

SEQ ID NO: 26667 - protein, 58 aa, Artificial Sequence; identical to SEQ ID NO: 26653
  Synthetic

SEQ ID NO: 26668 - protein, 58 aa, Artificial Sequence; identical to SEQ ID NO: 26647
  Synthetic

SEQ ID NO: 26669 - protein, 58 aa, Artificial Sequence
  Synthetic
SEAERLADEVRKAVKKSEEDNETLVREVEKAVRELKKNNKTWVDEVRKLMKRLVDLLR

SEQ ID NO: 26670 - protein, 58 aa, Artificial Sequence; identical to SEQ ID NO: 26669
  Synthetic

SEQ ID NO: 26671 - protein, 58 aa, Artificial Sequence
  Synthetic
DKDKRLEELLKRLKELNDKTFEELERILEELKRANEASLREAERILEELRARIEGGNL

SEQ ID NO: 26672 - protein, 58 aa, Artificial Sequence
  Synthetic
SEAEDLEELIKELAELLKDVIRKLEKINRRLVKILEDIIRRLKEISKEAEEELRKGTV

SEQ ID NO: 26673 - protein, 58 aa, Artificial Sequence
  Synthetic
SDKEEIKRRVEKTARDLETEHDKIKKRLEDTVRDIKRELDELLEKYERVLRKIEKTLR

SEQ ID NO: 26674 - protein, 58 aa, Artificial Sequence
  Synthetic
SEAEKIREALETNLRLLEELIKRLKEILDTHNELLRRVIETLERLLKELLELLEEGGL

SEQ ID NO: 26675 - protein, 58 aa, Artificial Sequence; identical to SEQ ID NO: 26674
  Synthetic

SEQ ID NO: 26676 - protein, 58 aa, Artificial Sequence
  Synthetic
SKEERLREVAEKHKKDLEDIVKRVDEAAKETARRLEEILKRLEEVLKKILDDLEKGPD

SEQ ID NO: 26677 - protein, 58 aa, Artificial Sequence
  Synthetic
SLEEITKRLLELVEENLARHEEILRELLELAKRLAKEDRDILEEVLKLIEELLKLLED

SEQ ID NO: 26678 - protein, 58 aa, Artificial Sequence
  Synthetic
SKEETLKRLLDELEKRNRETVERLERLLKELEDRNRASLEELEAVLEELERKIEESGL

SEQ ID NO: 26679 - protein, 58 aa, Artificial Sequence; identical to SEQ ID NO: 26678
  Synthetic

SEQ ID NO: 26680 - protein, 58 aa, Artificial Sequence; identical to SEQ ID NO: 26678
  Synthetic

SEQ ID NO: 26681 - protein, 58 aa, Artificial Sequence
  Synthetic
STREKAKKVLDTLRADNEDMKRVVEKILRALKRTNERAEKLAREITEEIKRILKEVGV

SEQ ID NO: 26682 - protein, 58 aa, Artificial Sequence
  Synthetic
DAEEVVKRLADVLRENDETIRKVVEDLVRIAEENDRLWKKLVEDIAEILRRIVELLRR

SEQ ID NO: 26683 - protein, 58 aa, Artificial Sequence; identical to SEQ ID NO: 26678
  Synthetic

SEQ ID NO: 26684 - protein, 58 aa, Artificial Sequence; identical to SEQ ID NO: 26681
  Synthetic

SEQ ID NO: 26685 - protein, 58 aa, Artificial Sequence
  Synthetic
SKEEEVEKVLRKWEEILRRLIEENKRANDKIRREYEELVKEIRRVLEEIKEVAERLGV

SEQ ID NO: 26686 - protein, 58 aa, Artificial Sequence
  Synthetic
DREKSVRDIEEDLKRVLDKLRRRVETSKEELKKVLKADKENADELEKTLRDVVRELDR

SEQ ID NO: 26687 - protein, 58 aa, Artificial Sequence; identical to SEQ ID NO: 26673
  Synthetic

SEQ ID NO: 26688 - protein, 58 aa, Artificial Sequence; identical to SEQ ID NO: 26681
  Synthetic

SEQ ID NO: 26689 - protein, 58 aa, Artificial Sequence
  Synthetic
SKDEELARLLEELVERWRKIVEDLERDHRRLVKEIRELVERIRKKLEELVDRIRKNGI

SEQ ID NO: 26690 - protein, 58 aa, Artificial Sequence; identical to SEQ ID NO: 26669
  Synthetic

SEQ ID NO: 26691 - protein, 58 aa, Artificial Sequence; identical to SEQ ID NO: 26689
  Synthetic

SEQ ID NO: 26692 - protein, 58 aa, Artificial Sequence
  Synthetic
KEIEETLKELEDLNREMVETNRRVLEETRRLNKETVDRVKATLDELAKMLKKLVDDVR

SEQ ID NO: 26693 - protein, 58 aa, Artificial Sequence; identical to SEQ ID NO: 26669
  Synthetic

SEQ ID NO: 26694 - protein, 58 aa, Artificial Sequence; identical to SEQ ID NO: 26678
  Synthetic

SEQ ID NO: 26695 - protein, 58 aa, Artificial Sequence
  Synthetic
DKAEVLREALKLLKDLLEELIKIHEESLKRILDLIDTLVKVHEDALRALKELLERSGL

SEQ ID NO: 26696 - protein, 58 aa, Artificial Sequence; identical to SEQ ID NO: 26685
  Synthetic

SEQ ID NO: 26697 - protein, 58 aa, Artificial Sequence; identical to SEQ ID NO: 26678
  Synthetic

SEQ ID NO: 26698 - protein, 56 aa, Artificial Sequence
  Synthetic
SERVKEILERILRVVEEAVRLNEESLRRILDVVRKAVKLDRESLKKILDVVEEAVR

SEQ ID NO: 26699 - protein, 56 aa, Artificial Sequence; identical to SEQ ID NO: 26698
  Synthetic

SEQ ID NO: 26700 - protein, 57 aa, Artificial Sequence
  Synthetic
DERRIAERIRELLRESKKLVRDVVEEAKRLLKENRDSTRKIIEDIRRLLRKIEDSTR

SEQ ID NO: 26701 - protein, 55 aa, Artificial Sequence
  Synthetic
DALSRLLEELLRVVDDLIRVLKELIDKSRKVIEELLELLKRINEENLKVLAEIIK

SEQ ID NO: 26702 - protein, 57 aa, Artificial Sequence; identical to SEQ ID NO: 26700
  Synthetic

SEQ ID NO: 26703 - protein, 58 aa, Artificial Sequence
  Synthetic
EALRKLVELLVEVLRRLIRVNRELVKLLREVLERLLRILRESVKKLKRLIEKVIKDAT

SEQ ID NO: 26704 - protein, 58 aa, Artificial Sequence; identical to SEQ ID NO: 26703
  Synthetic

SEQ ID NO: 26705 - protein, 58 aa, Artificial Sequence
  Synthetic
AAKRLVEELLKAVTDLSRKNKRILEELLKAIETLSDENKKILTEILDALRRLVEKIEK

SEQ ID NO: 26706 - protein, 58 aa, Artificial Sequence; identical to SEQ ID NO: 26703
  Synthetic

SEQ ID NO: 26707 - protein, 58 aa, Artificial Sequence; identical to SEQ ID NO: 26703
  Synthetic

SEQ ID NO: 26708 - protein, 55 aa, Artificial Sequence; identical to SEQ ID NO: 26701
  Synthetic

SEQ ID NO: 26709 - protein, 55 aa, Artificial Sequence; identical to SEQ ID NO: 26701
  Synthetic

SEQ ID NO: 26710 - protein, 58 aa, Artificial Sequence
  Synthetic
RAVKKLDEIVKEVAKKLEDVVRANEELWRALVELNKESVRRLREIVERVARDLEETAR

SEQ ID NO: 26711 - protein, 58 aa, Artificial Sequence
  Synthetic
DRLDKVEELVKKLLEDTKRTVDRVRELVRKILKKSRETLEELERLIEKILRELEKDAR

SEQ ID NO: 26712 - protein, 55 aa, Artificial Sequence; identical to SEQ ID NO: 26701
  Synthetic

SEQ ID NO: 26713 - protein, 58 aa, Artificial Sequence; identical to SEQ ID NO: 26710
  Synthetic

SEQ ID NO: 26714 - protein, 58 aa, Artificial Sequence; identical to SEQ ID NO: 26710
  Synthetic

SEQ ID NO: 26715 - protein, 57 aa, Artificial Sequence
  Synthetic
SEDDLKRVVDEVEKKLRELKRRYAEALERIKEKIKELKDRYERAVREVVAELRKTTK

SEQ ID NO: 26716 - protein, 58 aa, Artificial Sequence; identical to SEQ ID NO: 26710
  Synthetic

SEQ ID NO: 26717 - protein, 55 aa, Artificial Sequence; identical to SEQ ID NO: 26076
  Synthetic

SEQ ID NO: 26718 - protein, 57 aa, Artificial Sequence; identical to SEQ ID NO: 26715
  Synthetic

SEQ ID NO: 26719 - protein, 58 aa, Artificial Sequence
  Synthetic
DEAKELLDEIRKAVKESEDRLEKLLRDYEKELRRLEKELRDLKRRIEEKLEELRRGSL

SEQ ID NO: 26720 - protein, 58 aa, Artificial Sequence
  Synthetic
SEKEDAARKLRKLVEELTREYEELVKKLERLIEEIEKVSEESVRKLEKLLAEISEEVR

SEQ ID NO: 26721 - protein, 58 aa, Artificial Sequence
  Synthetic
SEDEIIKKIIEDLRRVLKEVEEIHKEVEERLDKVLKEAEEMHKEVLKELDRVLDEVKR

SEQ ID NO: 26722 - protein, 58 aa, Artificial Sequence
  Synthetic
SKAEEIAEKLDRLLEENRRALEEITTRLDDLLRRNKDALRKVMEKLKRLLDDLRRGGI

SEQ ID NO: 26723 - protein, 58 aa, Artificial Sequence
  Synthetic
SEKEKLLKESEEEVRRLRRTLEELLRKYREVLERLRKELREIEERVRDVVRRLKEVLD

SEQ ID NO: 26724 - protein, 58 aa, Artificial Sequence; identical to SEQ ID NO: 26720
  Synthetic

SEQ ID NO: 26725 - protein, 58 aa, Artificial Sequence
  Synthetic
SKEETLRKEAEDLLRRLEELTRRLEKKARELLERAKKLSRDLAEELKRLLKELREKGV

SEQ ID NO: 26726 - protein, 58 aa, Artificial Sequence; identical to SEQ ID NO: 26720
  Synthetic

SEQ ID NO: 26727 - protein, 58 aa, Artificial Sequence; identical to SEQ ID NO: 26722
  Synthetic

SEQ ID NO: 26728 - protein, 58 aa, Artificial Sequence; identical to SEQ ID NO: 26720
  Synthetic

SEQ ID NO: 26729 - protein, 58 aa, Artificial Sequence; identical to SEQ ID NO: 26722
  Synthetic

SEQ ID NO: 26730 - protein, 58 aa, Artificial Sequence; identical to SEQ ID NO: 26725
  Synthetic

SEQ ID NO: 26731 - protein, 58 aa, Artificial Sequence
  Synthetic
SRVEELKKLIEDILRISREVVERIKRVAEDIHRINRRVLDDLRKLIEDILRTVEEILA

SEQ ID NO: 26732 - protein, 58 aa, Artificial Sequence; identical to SEQ ID NO: 26725
  Synthetic

SEQ ID NO: 26733 - protein, 58 aa, Artificial Sequence; identical to SEQ ID NO: 26722
  Synthetic

SEQ ID NO: 26734 - protein, 58 aa, Artificial Sequence; identical to SEQ ID NO: 26725
  Synthetic

SEQ ID NO: 26735 - protein, 58 aa, Artificial Sequence; identical to SEQ ID NO: 26720
  Synthetic

SEQ ID NO: 26736 - protein, 58 aa, Artificial Sequence; identical to SEQ ID NO: 26725
  Synthetic

SEQ ID NO: 26737 - protein, 58 aa, Artificial Sequence
  Synthetic
SERETVKRRLEELLKEVKRTLDKLKEEHDRLLEDVRRVVEELKREHDKLLKEVKDSGV

SEQ ID NO: 26738 - protein, 58 aa, Artificial Sequence; identical to SEQ ID NO: 26720
  Synthetic

SEQ ID NO: 26739 - protein, 58 aa, Artificial Sequence; identical to SEQ ID NO: 26725
  Synthetic

SEQ ID NO: 26740 - protein, 58 aa, Artificial Sequence
  Synthetic
KEREEVKEKLDRLLEEVEKTVRELKREHDELLKEVEKLVRDLKKEHDELLKKVKDDGV

SEQ ID NO: 26741 - protein, 58 aa, Artificial Sequence
  Synthetic
SREEVLRELEEVIEDNRRLLEELIEKSKKVLDESLKLIDELLRRLEEVLERVLRLLEE

SEQ ID NO: 26742 - protein, 56 aa, Artificial Sequence; identical to SEQ ID NO: 16914
  Synthetic

SEQ ID NO: 26743 - protein, 57 aa, Artificial Sequence
  Synthetic
SEDSVERIARELERNLDDLARVLKESEDDLAEILRRLKEVLEESERDLERVEREVRK

SEQ ID NO: 26744 - protein, 56 aa, Artificial Sequence; identical to SEQ ID NO: 25244
  Synthetic

SEQ ID NO: 26745 - protein, 57 aa, Artificial Sequence
  Synthetic
SKEKIDRIIRELERILEEAKKKHEDVLRRLEDSLRRVAELLKAALDRLREIVDRLRR

SEQ ID NO: 26746 - protein, 56 aa, Artificial Sequence; identical to SEQ ID NO: 16914
  Synthetic

SEQ ID NO: 26747 - protein, 57 aa, Artificial Sequence
  Synthetic
DIKTLLDRVRKLAEEDAERLDRLRRESEELNERVRRVDKKLLEEIRRKAKKVEDDTR

SEQ ID NO: 26748 - protein, 57 aa, Artificial Sequence
  Synthetic
DAETLLRELEKLSRDNKELLKKIEKEIRDLIKEDKERNIELSERLRKLVEELKKKAT

SEQ ID NO: 26749 - protein, 56 aa, Artificial Sequence; identical to SEQ ID NO: 16914
  Synthetic

SEQ ID NO: 26750 - protein, 57 aa, Artificial Sequence; identical to SEQ ID NO: 26747
  Synthetic

SEQ ID NO: 26751 - protein, 56 aa, Artificial Sequence
  Synthetic
SEELSAEVKKLLDEVRKALARHKDENDKLLKEIEDSLRRHKEENDRLLEKLKESTR

SEQ ID NO: 26752 - protein, 57 aa, Artificial Sequence
  Synthetic
DADDVLARVEELAKRAHDENERLIREVEELVRAHNKRNKELVDEVKRLVEKVIEEER

SEQ ID NO: 26753 - protein, 57 aa, Artificial Sequence; identical to SEQ ID NO: 26745
  Synthetic

SEQ ID NO: 26754 - protein, 56 aa, Artificial Sequence; identical to SEQ ID NO: 16914
  Synthetic

SEQ ID NO: 26755 - protein, 56 aa, Artificial Sequence; identical to SEQ ID NO: 26751
  Synthetic

SEQ ID NO: 26756 - protein, 57 aa, Artificial Sequence
  Synthetic
DAETVLRSAEDIVAKNRKLAEEVLRRVKKIVEENRKIASEVLDDVRKLVEDVLARAS

SEQ ID NO: 26757 - protein, 57 aa, Artificial Sequence; identical to SEQ ID NO: 26752
  Synthetic

SEQ ID NO: 26758 - protein, 57 aa, Artificial Sequence; identical to SEQ ID NO: 26745
  Synthetic

SEQ ID NO: 26759 - protein, 57 aa, Artificial Sequence
  Synthetic
DEEKLKDLIRKLRDILRRAAEAHKKLIDDARESLERAKREHEKLIDRLKKILEELER

SEQ ID NO: 26760 - protein, 57 aa, Artificial Sequence; identical to SEQ ID NO: 26747
  Synthetic

SEQ ID NO: 26761 - protein, 57 aa, Artificial Sequence
  Synthetic
DATRVIEEAKRILDEARKLNEETIRRSEELVRRIERVIEEIIKRSEKLLEDVARESK

SEQ ID NO: 26762 - protein, 56 aa, Artificial Sequence; identical to SEQ ID NO: 26751
  Synthetic

SEQ ID NO: 26763 - protein, 57 aa, Artificial Sequence; identical to SEQ ID NO: 26756
  Synthetic

SEQ ID NO: 26764 - protein, 57 aa, Artificial Sequence; identical to SEQ ID NO: 26752
  Synthetic

SEQ ID NO: 26765 - protein, 56 aa, Artificial Sequence; identical to SEQ ID NO: 25244
  Synthetic

SEQ ID NO: 26766 - protein, 56 aa, Artificial Sequence
  Synthetic
DEEVLKKLAEIVRRVKEENRKVNEEVEKRLRELEEENKKVIEDLKSTVEELVERLR

SEQ ID NO: 26767 - protein, 56 aa, Artificial Sequence; identical to SEQ ID NO: 26766
  Synthetic

SEQ ID NO: 26768 - protein, 55 aa, Artificial Sequence
  Synthetic
DKLLKEARDLIREIEKRLEELLKRVEKLTEDAKRDLERSNREHKELADRIKETAR

SEQ ID NO: 26769 - protein, 56 aa, Artificial Sequence
  Synthetic
DKDSARELERIVKENAELAERVFREVEKIVRENTKLAEDSVRELKRLVEELKKRAK

SEQ ID NO: 26770 - protein, 57 aa, Artificial Sequence; identical to SEQ ID NO: 26745
  Synthetic

SEQ ID NO: 26771 - protein, 57 aa, Artificial Sequence; identical to SEQ ID NO: 26759
  Synthetic

SEQ ID NO: 26772 - protein, 56 aa, Artificial Sequence; identical to SEQ ID NO: 16914
  Synthetic

SEQ ID NO: 26773 - protein, 57 aa, Artificial Sequence
  Synthetic
DEEVLRTLEEIIRRLTKELEDVLREYERELRRLEEENKRVIDKTEEEIRRLADRLRR

SEQ ID NO: 26774 - protein, 57 aa, Artificial Sequence
  Synthetic
DERILRELEERVKELEKEAREILKRSEDETDKLREKAERILEDLERANRRTMDEARR

SEQ ID NO: 26775 - protein, 56 aa, Artificial Sequence; identical to SEQ ID NO: 26751
  Synthetic

SEQ ID NO: 26776 - protein, 58 aa, Artificial Sequence
  Synthetic
LPEEVLRELEELLKESEERIKRIEEEIKKIIDKSREDIKRVLEEIERLNAKAADDLRK

SEQ ID NO: 26777 - protein, 57 aa, Artificial Sequence; identical to SEQ ID NO: 26752
  Synthetic

SEQ ID NO: 26778 - protein, 56 aa, Artificial Sequence; identical to SEQ ID NO: 26766
  Synthetic

SEQ ID NO: 26779 - protein, 55 aa, Artificial Sequence; identical to SEQ ID NO: 26768
  Synthetic

SEQ ID NO: 26780 - protein, 57 aa, Artificial Sequence; identical to SEQ ID NO: 26773
  Synthetic

SEQ ID NO: 26781 - protein, 56 aa, Artificial Sequence
  Synthetic
DRRIEKVLKEIEEKIREVIKEWERVHREVEELLKRLIDENRKVLDEIRKLLEEKSK

SEQ ID NO: 26782 - protein, 57 aa, Artificial Sequence; identical to SEQ ID NO: 26774
  Synthetic

SEQ ID NO: 26783 - protein, 56 aa, Artificial Sequence; identical to SEQ ID NO: 26751
  Synthetic

SEQ ID NO: 26784 - protein, 56 aa, Artificial Sequence; identical to SEQ ID NO: 26766
  Synthetic

SEQ ID NO: 26785 - protein, 57 aa, Artificial Sequence; identical to SEQ ID NO: 26745
  Synthetic

SEQ ID NO: 26786 - protein, 56 aa, Artificial Sequence; identical to SEQ ID NO: 26781
  Synthetic

SEQ ID NO: 26787 - protein, 57 aa, Artificial Sequence
  Synthetic
TLRELARSIRKLSAENKERLKELLRELKKLSDENKERIKKLLSDAEKIIEDVARRAK

SEQ ID NO: 26788 - protein, 57 aa, Artificial Sequence; identical to SEQ ID NO: 26774
  Synthetic

SEQ ID NO: 26789 - protein, 58 aa, Artificial Sequence
  Synthetic
EKLKELRDVIAEVAKRIDELDEYTRESIRRAKKEIERLNRETKKVIEEVVKRIEEERK

SEQ ID NO: 26790 - protein, 56 aa, Artificial Sequence
  Synthetic
DERVREELKKLLTRVEEEHRKVLETDKKILKEAHKESKEVNDRDRELLERLEESVR

SEQ ID NO: 26791 - protein, 57 aa, Artificial Sequence; identical to SEQ ID NO: 26752
  Synthetic

SEQ ID NO: 26792 - protein, 57 aa, Artificial Sequence
  Synthetic
TVKRLLDELRELLERLKRTIEELLKRNRDLLADAEEKARRLLEENRKLLKAARDTAT

SEQ ID NO: 26793 - protein, 56 aa, Artificial Sequence; identical to SEQ ID NO: 26766
  Synthetic

SEQ ID NO: 26794 - protein, 57 aa, Artificial Sequence; identical to SEQ ID NO: 26745
  Synthetic

SEQ ID NO: 26795 - protein, 57 aa, Artificial Sequence; identical to SEQ ID NO: 26774
  Synthetic

SEQ ID NO: 26796 - protein, 57 aa, Artificial Sequence; identical to SEQ ID NO: 26761
  Synthetic

SEQ ID NO: 26797 - protein, 58 aa, Artificial Sequence
  Synthetic
EAAREIIKRLREVNKRTKEKLDELIKHSEEVLERVKRLIDELRKHSEEVLEDLRRRAK

SEQ ID NO: 26798 - protein, 58 aa, Artificial Sequence; identical to SEQ ID NO: 26789
  Synthetic

SEQ ID NO: 26799 - protein, 58 aa, Artificial Sequence
  Synthetic
ELLRRIKKLLDEIKKAIEDSSREIKRLLEESERVMKRSSEDIKRTLDDTRRVVEEVRR

SEQ ID NO: 26800 - protein, 55 aa, Artificial Sequence
  Synthetic
SKAIKDVRDIVKKVKDELKEWRDRNKELVDRLSEELKEWLKDVERVLKELTDKDR

SEQ ID NO: 26801 - protein, 56 aa, Artificial Sequence; identical to SEQ ID NO: 26790
  Synthetic

SEQ ID NO: 26802 - protein, 57 aa, Artificial Sequence
  Synthetic
DIDKLLKELRDLVEKIKKDLKELLERYEEIVRRIKELLKDLNREAEEVVRRLKEELR

SEQ ID NO: 26803 - protein, 57 aa, Artificial Sequence; identical to SEQ ID NO: 26752
  Synthetic

SEQ ID NO: 26804 - protein, 56 aa, Artificial Sequence; identical to SEQ ID NO: 26766
  Synthetic

SEQ ID NO: 26805 - protein, 58 aa, Artificial Sequence
  Synthetic
EREEELKEVADRVKEKLDRLNRENEKSSEELKRELDKINDENRETSERLKREIDETTR

SEQ ID NO: 26806 - protein, 57 aa, Artificial Sequence; identical to SEQ ID NO: 26745
  Synthetic

SEQ ID NO: 26807 - protein, 57 aa, Artificial Sequence; identical to SEQ ID NO: 26745
  Synthetic

SEQ ID NO: 26808 - protein, 57 aa, Artificial Sequence
  Synthetic
TKDLLDENSKRSNEISREVKKDLERTVRENKKIVDEVAKALEDTVDKNRRIVEEVTT

SEQ ID NO: 26809 - protein, 56 aa, Artificial Sequence; identical to SEQ ID NO: 16914
  Synthetic

SEQ ID NO: 26810 - protein, 56 aa, Artificial Sequence; identical to SEQ ID NO: 26781
  Synthetic

SEQ ID NO: 26811 - protein, 58 aa, Artificial Sequence; identical to SEQ ID NO: 26799
  Synthetic

SEQ ID NO: 26812 - protein, 56 aa, Artificial Sequence; identical to SEQ ID NO: 26751
  Synthetic

SEQ ID NO: 26813 - protein, 57 aa, Artificial Sequence; identical to SEQ ID NO: 26802
  Synthetic

SEQ ID NO: 26814 - protein, 57 aa, Artificial Sequence; identical to SEQ ID NO: 26752
  Synthetic

SEQ ID NO: 26815 - protein, 56 aa, Artificial Sequence; identical to SEQ ID NO: 26766
  Synthetic

SEQ ID NO: 26816 - protein, 56 aa, Artificial Sequence; identical to SEQ ID NO: 26766
  Synthetic

SEQ ID NO: 26817 - protein, 57 aa, Artificial Sequence; identical to SEQ ID NO: 26745
  Synthetic

SEQ ID NO: 26818 - protein, 56 aa, Artificial Sequence
  Synthetic
SEELREELKKLERKIEKVAKEIHDHDKEVTERLEDLLRRITEHARKSDREIEETAR

SEQ ID NO: 26819 - protein, 56 aa, Artificial Sequence; identical to SEQ ID NO: 26781
  Synthetic

SEQ ID NO: 26820 - protein, 57 aa, Artificial Sequence; identical to SEQ ID NO: 26761
  Synthetic

SEQ ID NO: 26821 - protein, 58 aa, Artificial Sequence; identical to SEQ ID NO: 26789
  Synthetic

SEQ ID NO: 26822 - protein, 58 aa, Artificial Sequence; identical to SEQ ID NO: 26799
  Synthetic

SEQ ID NO: 26823 - protein, 57 aa, Artificial Sequence; identical to SEQ ID NO: 26802
  Synthetic

SEQ ID NO: 26824 - protein, 58 aa, Artificial Sequence
  Synthetic
EAKKKLDEVLERAKRTIDRLLETSDRSLEKVEADLRRLNEELDRSLERAERTIRELAK

SEQ ID NO: 26825 - protein, 56 aa, Artificial Sequence; identical to SEQ ID NO: 26766
  Synthetic

SEQ ID NO: 26826 - protein, 56 aa, Artificial Sequence; identical to SEQ ID NO: 26766
  Synthetic

SEQ ID NO: 26827 - protein, 56 aa, Artificial Sequence; identical to SEQ ID NO: 26781
  Synthetic

SEQ ID NO: 26828 - protein, 57 aa, Artificial Sequence; identical to SEQ ID NO: 26774
  Synthetic

SEQ ID NO: 26829 - protein, 57 aa, Artificial Sequence
  Synthetic
DLKRVEERAREVSRRNEESMRRVKEDADRVSEANKEVLDRVREEVKRLIEEVRETLR

SEQ ID NO: 26830 - protein, 58 aa, Artificial Sequence; identical to SEQ ID NO: 26789
  Synthetic

SEQ ID NO: 26831 - protein, 58 aa, Artificial Sequence; identical to SEQ ID NO: 26799
  Synthetic

SEQ ID NO: 26832 - protein, 58 aa, Artificial Sequence; identical to SEQ ID NO: 26799
  Synthetic

SEQ ID NO: 26833 - protein, 58 aa, Artificial Sequence; identical to SEQ ID NO: 26776
  Synthetic

SEQ ID NO: 26834 - protein, 58 aa, Artificial Sequence; identical to SEQ ID NO: 26824
  Synthetic

SEQ ID NO: 26835 - protein, 56 aa, Artificial Sequence; identical to SEQ ID NO: 26766
  Synthetic

SEQ ID NO: 26836 - protein, 55 aa, Artificial Sequence; identical to SEQ ID NO: 26768
  Synthetic

SEQ ID NO: 26837 - protein, 55 aa, Artificial Sequence; identical to SEQ ID NO: 26768
  Synthetic

SEQ ID NO: 26838 - protein, 58 aa, Artificial Sequence
  Synthetic
DIVRKIERIVETIEREVRESVKKVEEIARDIRRKVDESVKNVEKLLRDVDKKARDRKK

SEQ ID NO: 26839 - protein, 55 aa, Artificial Sequence
  Synthetic
DEIKRIVDEVRERLKRIVDENAKIVEDARRALEKIVKENEEILRRLKKELRELRK

SEQ ID NO: 26840 - protein, 56 aa, Artificial Sequence; identical to SEQ ID NO: 26781
  Synthetic

SEQ ID NO: 26841 - protein, 57 aa, Artificial Sequence; identical to SEQ ID NO: 26829
  Synthetic

SEQ ID NO: 26842 - protein, 57 aa, Artificial Sequence; identical to SEQ ID NO: 26761
  Synthetic

SEQ ID NO: 26843 - protein, 57 aa, Artificial Sequence
  Synthetic
DAETIERVVRELLEENKEVLRKTEEAVKRSTETNKRLLEASKEVADRLRERIKEAAK

SEQ ID NO: 26844 - protein, 58 aa, Artificial Sequence; identical to SEQ ID NO: 26789
  Synthetic

SEQ ID NO: 26845 - protein, 58 aa, Artificial Sequence; identical to SEQ ID NO: 26799
  Synthetic

SEQ ID NO: 26846 - protein, 55 aa, Artificial Sequence
  Synthetic
DEVVERAERISEENKRRVEDVARKSKELVEDVRRHSEEVVRRVEELVKEVEERVR

SEQ ID NO: 26847 - protein, 58 aa, Artificial Sequence; identical to SEQ ID NO: 26824
  Synthetic

SEQ ID NO: 26848 - protein, 57 aa, Artificial Sequence
  Synthetic
TAERARETLKRLLDENRDRSKKVKEEIRRILEDLTRTTERVKREIAKLLKELEDTAR

SEQ ID NO: 26849 - protein, 58 aa, Artificial Sequence; identical to SEQ ID NO: 25262
  Synthetic

SEQ ID NO: 26850 - protein, 57 aa, Artificial Sequence; identical to SEQ ID NO: 26774
  Synthetic

SEQ ID NO: 26851 - protein, 57 aa, Artificial Sequence; identical to SEQ ID NO: 26761
  Synthetic

SEQ ID NO: 26852 - protein, 58 aa, Artificial Sequence
  Synthetic
DKARKVAEVAEKVLRDIDKLDRESKEAFRATNEEIAKLDEDTARVAERVKKAIEDLAK

SEQ ID NO: 26853 - protein, 58 aa, Artificial Sequence; identical to SEQ ID NO: 26789
  Synthetic

SEQ ID NO: 26854 - protein, 58 aa, Artificial Sequence; identical to SEQ ID NO: 26799
  Synthetic

SEQ ID NO: 26855 - protein, 58 aa, Artificial Sequence
  Synthetic
DKVERVVREVEKLHEEDRKRLEESTRSVRKLLEELKRELEKSTRSVKALVDELRERVR

SEQ ID NO: 26856 - protein, 55 aa, Artificial Sequence; identical to SEQ ID NO: 26846
  Synthetic

SEQ ID NO: 26857 - protein, 58 aa, Artificial Sequence; identical to SEQ ID NO: 26824
  Synthetic

SEQ ID NO: 26858 - protein, 57 aa, Artificial Sequence; identical to SEQ ID NO: 26848
  Synthetic

SEQ ID NO: 26859 - protein, 57 aa, Artificial Sequence; identical to SEQ ID NO: 26774
  Synthetic

SEQ ID NO: 26860 - protein, 57 aa, Artificial Sequence; identical to SEQ ID NO: 26774
  Synthetic

SEQ ID NO: 26861 - protein, 57 aa, Artificial Sequence; identical to SEQ ID NO: 26829
  Synthetic

SEQ ID NO: 26862 - protein, 58 aa, Artificial Sequence; identical to SEQ ID NO: 26852
  Synthetic

SEQ ID NO: 26863 - protein, 58 aa, Artificial Sequence; identical to SEQ ID NO: 26799
  Synthetic

SEQ ID NO: 26864 - protein, 55 aa, Artificial Sequence; identical to SEQ ID NO: 26800
  Synthetic

SEQ ID NO: 26865 - protein, 58 aa, Artificial Sequence; identical to SEQ ID NO: 26855
  Synthetic

SEQ ID NO: 26866 - protein, 57 aa, Artificial Sequence; identical to SEQ ID NO: 26802
  Synthetic

SEQ ID NO: 26867 - protein, 58 aa, Artificial Sequence; identical to SEQ ID NO: 26824
  Synthetic

SEQ ID NO: 26868 - protein, 55 aa, Artificial Sequence; identical to SEQ ID NO: 26768
  Synthetic

SEQ ID NO: 26869 - protein, 57 aa, Artificial Sequence; identical to SEQ ID NO: 26848
  Synthetic

SEQ ID NO: 26870 - protein, 55 aa, Artificial Sequence; identical to SEQ ID NO: 26839
  Synthetic

SEQ ID NO: 26871 - protein, 55 aa, Artificial Sequence
  Synthetic
DRIEEELKRLIDTLREKNREVEKRARDSNRDLKRTNDEIAKEVRELIKKLREDLK

SEQ ID NO: 26872 - protein, 57 aa, Artificial Sequence; identical to SEQ ID NO: 26774
  Synthetic

SEQ ID NO: 26873 - protein, 57 aa, Artificial Sequence; identical to SEQ ID NO: 26843
  Synthetic

SEQ ID NO: 26874 - protein, 58 aa, Artificial Sequence; identical to SEQ ID NO: 26852
  Synthetic

SEQ ID NO: 26875 - protein, 58 aa, Artificial Sequence; identical to SEQ ID NO: 26855
  Synthetic

SEQ ID NO: 26876 - protein, 57 aa, Artificial Sequence
  Synthetic
DIERILRELEAVLKKLTDESERLNREVERVSRDTKKKSKELNEELKAVLDEVKRKAD

SEQ ID NO: 26877 - protein, 55 aa, Artificial Sequence; identical to SEQ ID NO: 26846
  Synthetic

SEQ ID NO: 26878 - protein, 58 aa, Artificial Sequence; identical to SEQ ID NO: 26824
  Synthetic

SEQ ID NO: 26879 - protein, 57 aa, Artificial Sequence; identical to SEQ ID NO: 26848
  Synthetic

SEQ ID NO: 26880 - protein, 55 aa, Artificial Sequence; identical to SEQ ID NO: 26839
  Synthetic

SEQ ID NO: 26881 - protein, 56 aa, Artificial Sequence; identical to SEQ ID NO: 26781
  Synthetic

SEQ ID NO: 26882 - protein, 57 aa, Artificial Sequence; identical to SEQ ID NO: 26829
  Synthetic

SEQ ID NO: 26883 - protein, 57 aa, Artificial Sequence; identical to SEQ ID NO: 26843
  Synthetic

SEQ ID NO: 26884 - protein, 58 aa, Artificial Sequence; identical to SEQ ID NO: 26852
  Synthetic

SEQ ID NO: 26885 - protein, 58 aa, Artificial Sequence; identical to SEQ ID NO: 26799
  Synthetic

SEQ ID NO: 26886 - protein, 58 aa, Artificial Sequence; identical to SEQ ID NO: 26855
  Synthetic

SEQ ID NO: 26887 - protein, 58 aa, Artificial Sequence; identical to SEQ ID NO: 26824
  Synthetic

SEQ ID NO: 26888 - protein, 57 aa, Artificial Sequence; identical to SEQ ID NO: 26848
  Synthetic

SEQ ID NO: 26889 - protein, 55 aa, Artificial Sequence; identical to SEQ ID NO: 26839
  Synthetic

SEQ ID NO: 26890 - protein, 58 aa, Artificial Sequence; identical to SEQ ID NO: 26852
  Synthetic

SEQ ID NO: 26891 - protein, 58 aa, Artificial Sequence
  Synthetic
DEVTKVKKVADDVLAEIKKLDDETRRVIEDTNKKIADLDKATRDVVRKVLEEVKKLEK

SEQ ID NO: 26892 - protein, 57 aa, Artificial Sequence; identical to SEQ ID NO: 26802
  Synthetic

SEQ ID NO: 26893 - protein, 57 aa, Artificial Sequence; identical to SEQ ID NO: 26848
  Synthetic

SEQ ID NO: 26894 - protein, 55 aa, Artificial Sequence; identical to SEQ ID NO: 26839
  Synthetic

SEQ ID NO: 26895 - protein, 58 aa, Artificial Sequence
  Synthetic
RLVREVEDLVRRLVRRSEKSNEEVKRTVEELVRRMEESNDRVRDLVRRLVEELKRAVD

SEQ ID NO: 26896 - protein, 58 aa, Artificial Sequence; identical to SEQ ID NO: 26852
  Synthetic

SEQ ID NO: 26897 - protein, 58 aa, Artificial Sequence; identical to SEQ ID NO: 26824
  Synthetic

SEQ ID NO: 26898 - protein, 58 aa, Artificial Sequence; identical to SEQ ID NO: 26895
  Synthetic

SEQ ID NO: 26899 - protein, 58 aa, Artificial Sequence; identical to SEQ ID NO: 26852
  Synthetic

SEQ ID NO: 26900 - protein, 58 aa, Artificial Sequence; identical to SEQ ID NO: 26891
  Synthetic

SEQ ID NO: 26901 - protein, 57 aa, Artificial Sequence; identical to SEQ ID NO: 26848
  Synthetic

SEQ ID NO: 26902 - protein, 57 aa, Artificial Sequence; identical to SEQ ID NO: 26829
  Synthetic

SEQ ID NO: 26903 - protein, 58 aa, Artificial Sequence; identical to SEQ ID NO: 26852
  Synthetic

SEQ ID NO: 26904 - protein, 58 aa, Artificial Sequence; identical to SEQ ID NO: 26891
  Synthetic

SEQ ID NO: 26905 - protein, 58 aa, Artificial Sequence; identical to SEQ ID NO: 26855
  Synthetic

SEQ ID NO: 26906 - protein, 58 aa, Artificial Sequence; identical to SEQ ID NO: 26824
  Synthetic

SEQ ID NO: 26907 - protein, 57 aa, Artificial Sequence; identical to SEQ ID NO: 26848
  Synthetic

SEQ ID NO: 26908 - protein, 57 aa, Artificial Sequence; identical to SEQ ID NO: 26848
  Synthetic

SEQ ID NO: 26909 - protein, 58 aa, Artificial Sequence; identical to SEQ ID NO: 26852
  Synthetic

SEQ ID NO: 26910 - protein, 58 aa, Artificial Sequence; identical to SEQ ID NO: 26891
  Synthetic

SEQ ID NO: 26911 - protein, 58 aa, Artificial Sequence; identical to SEQ ID NO: 26855
  Synthetic

SEQ ID NO: 26912 - protein, 57 aa, Artificial Sequence; identical to SEQ ID NO: 26848
  Synthetic

SEQ ID NO: 26913 - protein, 58 aa, Artificial Sequence; identical to SEQ ID NO: 26852
  Synthetic

SEQ ID NO: 26914 - protein, 58 aa, Artificial Sequence; identical to SEQ ID NO: 26895
  Synthetic

SEQ ID NO: 26915 - protein, 58 aa, Artificial Sequence
  Synthetic
SESDEVIRDLARLLDELARHVDDSVRRMDEVVKRSTREADELAKRLDELVKEVEKKPG

SEQ ID NO: 26916 - protein, 58 aa, Artificial Sequence
  Synthetic
SRAETVLKEVTDKIKKLADSSDELLRRNKENIDELKKSSEELLRRLTKAIEEIEKGSV

SEQ ID NO: 26917 - protein, 58 aa, Artificial Sequence
  Synthetic
SVDEVLKEIEDALRRLKEEVERVLKENEDELRRLEEEVRRVLKEDEELLESLKRGVGE

SEQ ID NO: 26918 - protein, 58 aa, Artificial Sequence
  Synthetic
SEVDEIIKELERLLAEIARENERIIRESRKLADEVRKRNEDAIRKLEELVARLADAVR

SEQ ID NO: 26919 - protein, 58 aa, Artificial Sequence
  Synthetic
SEVDDVLRRLEELIKTLEDINAKSLEDIKKLIDDLAKILEDALRKHEKLIRELREAKK

SEQ ID NO: 26920 - protein, 58 aa, Artificial Sequence; identical to SEQ ID NO: 26919
  Synthetic

SEQ ID NO: 26921 - protein, 58 aa, Artificial Sequence; identical to SEQ ID NO: 26916
  Synthetic

SEQ ID NO: 26922 - protein, 58 aa, Artificial Sequence
  Synthetic
KEVEDAVKELEDLLRANEDKTRSIVEDMRASNKDLEDHSRASEEEVRKLLDDLRRAGV

SEQ ID NO: 26923 - protein, 58 aa, Artificial Sequence; identical to SEQ ID NO: 26919
  Synthetic

SEQ ID NO: 26924 - protein, 58 aa, Artificial Sequence; identical to SEQ ID NO: 26915
  Synthetic

SEQ ID NO: 26925 - protein, 58 aa, Artificial Sequence
  Synthetic
SESDDVIRKLRELLEELRTHVEKSIRDLRKILEDSTRHAKRSIEELERLLEEVRKKPG

SEQ ID NO: 26926 - protein, 58 aa, Artificial Sequence; identical to SEQ ID NO: 26916
  Synthetic

SEQ ID NO: 26927 - protein, 58 aa, Artificial Sequence
  Synthetic
SEAEKAKETIDRLADRVRKLLEEIKRSLDDSRRKSKETVEENEKTLDRMRKEVDAAKR

SEQ ID NO: 26928 - protein, 58 aa, Artificial Sequence; identical to SEQ ID NO: 26927
  Synthetic

SEQ ID NO: 26929 - protein, 58 aa, Artificial Sequence
  Synthetic
SEVEELIKRLAKVLKELVDKVRKVIEDTKELLERLKRRSEDHIRKLREVLKEAKDQPI

SEQ ID NO: 26930 - protein, 58 aa, Artificial Sequence
  Synthetic
SELEEIEKKVRELTKRHRELVERVRKTVKELIETNRRLLETLTERIKRVLEEVRDLER

SEQ ID NO: 26931 - protein, 58 aa, Artificial Sequence
  Synthetic
SSEERLRAVIEDLKRLAEESRKRHKELIDELAKAVERIERRHKKLLDEIKAVVDDIRR

SEQ ID NO: 26932 - protein, 58 aa, Artificial Sequence
  Synthetic
DEIRKVVKEITDLLKASNDKNRKVVEEIRDLLRKSKKLADELVERLRALVEDLRRRID

SEQ ID NO: 26933 - protein, 58 aa, Artificial Sequence
  Synthetic
STAETVAEEVERVLKHSDDLIKEVEDVNRRVEEEIKRVIRELEEENERLVAEVRKGVK

SEQ ID NO: 26934 - protein, 58 aa, Artificial Sequence; identical to SEQ ID NO: 26918
  Synthetic

SEQ ID NO: 26935 - protein, 58 aa, Artificial Sequence
  Synthetic
SEIDEVLTRLRKISKDLNETSDRVNERARKIIDDIKKESKRVNDEAREIVERLKREID

SEQ ID NO: 26936 - protein, 58 aa, Artificial Sequence
  Synthetic
SEDEDLDRVAEKLAREHKKSVEEIKRVLKSADEESKKLVRDTERVIEEIKREVEEARR

SEQ ID NO: 26937 - protein, 58 aa, Artificial Sequence
  Synthetic
SSVEELLERLRRISEENKRRIEKLLREVEKVLRELKDRHRKLLKRVEEIIRKVKEEIK

SEQ ID NO: 26938 - protein, 58 aa, Artificial Sequence; identical to SEQ ID NO: 25117
  Synthetic

SEQ ID NO: 26939 - protein, 58 aa, Artificial Sequence; identical to SEQ ID NO: 26915
  Synthetic

SEQ ID NO: 26940 - protein, 58 aa, Artificial Sequence; identical to SEQ ID NO: 26922
  Synthetic

SEQ ID NO: 26941 - protein, 58 aa, Artificial Sequence; identical to SEQ ID NO: 26932
  Synthetic

SEQ ID NO: 26942 - protein, 58 aa, Artificial Sequence
  Synthetic
SRVEEIIEDLRRLLEEIRKENEDSIRRSKELLDRVKEINDTIIAELERLLKDIEKEVR

SEQ ID NO: 26943 - protein, 58 aa, Artificial Sequence; identical to SEQ ID NO: 26942
  Synthetic

SEQ ID NO: 26944 - protein, 58 aa, Artificial Sequence; identical to SEQ ID NO: 26919
  Synthetic

SEQ ID NO: 26945 - protein, 58 aa, Artificial Sequence
  Synthetic
SKLEEVEKAVRKVIEDSRRVNEEVNRRSEEVVRELEKVHREVNDASRRVVEKARRVLK

SEQ ID NO: 26946 - protein, 58 aa, Artificial Sequence; identical to SEQ ID NO: 26915
  Synthetic

SEQ ID NO: 26947 - protein, 58 aa, Artificial Sequence; identical to SEQ ID NO: 26915
  Synthetic

SEQ ID NO: 26948 - protein, 58 aa, Artificial Sequence; identical to SEQ ID NO: 26925
  Synthetic

SEQ ID NO: 26949 - protein, 58 aa, Artificial Sequence
  Synthetic
DEVRELLERNRRLLEEIKKTVKDLIRANEELLKRIEDDAKRLIDRNEELLDELEKGLS

SEQ ID NO: 26950 - protein, 58 aa, Artificial Sequence; identical to SEQ ID NO: 26932
  Synthetic

SEQ ID NO: 26951 - protein, 58 aa, Artificial Sequence; identical to SEQ ID NO: 26916
  Synthetic

SEQ ID NO: 26952 - protein, 58 aa, Artificial Sequence
  Synthetic
DEEEDLERAIKKLLDENRELLKRIAEELRRLLEELRRLTEESADRLRRLLKELKDRGV

SEQ ID NO: 26953 - protein, 58 aa, Artificial Sequence; identical to SEQ ID NO: 26932
  Synthetic

SEQ ID NO: 26954 - protein, 58 aa, Artificial Sequence
  Synthetic
SKEDRLREELKKLLARLAEEIERLKRALEESNKDLKRTIDASEKHLRDVNEDVKRGGV

SEQ ID NO: 26955 - protein, 58 aa, Artificial Sequence; identical to SEQ ID NO: 26915
  Synthetic

SEQ ID NO: 26956 - protein, 58 aa, Artificial Sequence; identical to SEQ ID NO: 26915
  Synthetic

SEQ ID NO: 26957 - protein, 58 aa, Artificial Sequence; identical to SEQ ID NO: 26925
  Synthetic

SEQ ID NO: 26958 - protein, 58 aa, Artificial Sequence; identical to SEQ ID NO: 26942
  Synthetic

SEQ ID NO: 26959 - protein, 58 aa, Artificial Sequence; identical to SEQ ID NO: 26918
  Synthetic

SEQ ID NO: 26960 - protein, 58 aa, Artificial Sequence; identical to SEQ ID NO: 26937
  Synthetic

SEQ ID NO: 26961 - protein, 58 aa, Artificial Sequence; identical to SEQ ID NO: 25261
  Synthetic

SEQ ID NO: 26962 - protein, 58 aa, Artificial Sequence; identical to SEQ ID NO: 26915
  Synthetic

SEQ ID NO: 26963 - protein, 58 aa, Artificial Sequence; identical to SEQ ID NO: 26925
  Synthetic

SEQ ID NO: 26964 - protein, 58 aa, Artificial Sequence; identical to SEQ ID NO: 26916
  Synthetic

SEQ ID NO: 26965 - protein, 58 aa, Artificial Sequence; identical to SEQ ID NO: 26949
  Synthetic

SEQ ID NO: 26966 - protein, 58 aa, Artificial Sequence
  Synthetic
STEEVLDEIRKLHKTLTEDIKRVLREIEELHRRTIEENKEVLDKIAEDYKRVIDDVRT

SEQ ID NO: 26967 - protein, 58 aa, Artificial Sequence
  Synthetic
SEIEKILKEIEDLARRDEEVSKKIVEDIRRLAKEVEDTSRDIVRKIEELAKRVLDRLR

SEQ ID NO: 26968 - protein, 58 aa, Artificial Sequence
  Synthetic
SEAERLEARARELLRANEELMDDLRAKAEELLKRNDRLVKEIEKKVREVLAAIEELKR

SEQ ID NO: 26969 - protein, 58 aa, Artificial Sequence
  Synthetic
DDLERAREEVADLIRKHEEKTRRILEESRRLNERHRELSARILDEIRKLAERIEELIK

SEQ ID NO: 26970 - protein, 58 aa, Artificial Sequence; identical to SEQ ID NO: 26952
  Synthetic

SEQ ID NO: 26971 - protein, 58 aa, Artificial Sequence; identical to SEQ ID NO: 26932
  Synthetic

SEQ ID NO: 26972 - protein, 58 aa, Artificial Sequence; identical to SEQ ID NO: 26932
  Synthetic

SEQ ID NO: 26973 - protein, 58 aa, Artificial Sequence
  Synthetic
STAETVEKKVEEVIRENEKSMRESEEKVDRSTKRIEDVLRRLEETIRKTSDDIAKGVK

SEQ ID NO: 26974 - protein, 58 aa, Artificial Sequence; identical to SEQ ID NO: 26942
  Synthetic

SEQ ID NO: 26975 - protein, 58 aa, Artificial Sequence; identical to SEQ ID NO: 26942
  Synthetic

SEQ ID NO: 26976 - protein, 58 aa, Artificial Sequence
  Synthetic
REVEEMIKELEELLKDLKEKNERASKRNRELVRRLEEENKRVIEELKKLVKELEDLVR

SEQ ID NO: 26977 - protein, 58 aa, Artificial Sequence; identical to SEQ ID NO: 26919
  Synthetic

SEQ ID NO: 26978 - protein, 58 aa, Artificial Sequence; identical to SEQ ID NO: 26945
  Synthetic

SEQ ID NO: 26979 - protein, 58 aa, Artificial Sequence
  Synthetic
DEVEDVLRKIEKILDDHRKRIEKNSRDMARIIDEHRRKVEENSREMKKLVDDLKKAVD

SEQ ID NO: 26980 - protein, 58 aa, Artificial Sequence; identical to SEQ ID NO: 26937
  Synthetic

SEQ ID NO: 26981 - protein, 58 aa, Artificial Sequence
  Synthetic
DEVEKVLEEIKRALDDLRKKVEESKREIKEALKAVEKHTRDSDTANKRTLAEIERGVK

SEQ ID NO: 26982 - protein, 58 aa, Artificial Sequence; identical to SEQ ID NO: 26915
  Synthetic

SEQ ID NO: 26983 - protein, 58 aa, Artificial Sequence; identical to SEQ ID NO: 26922
  Synthetic

SEQ ID NO: 26984 - protein, 58 aa, Artificial Sequence; identical to SEQ ID NO: 26932
  Synthetic

SEQ ID NO: 26985 - protein, 58 aa, Artificial Sequence; identical to SEQ ID NO: 26933
  Synthetic

SEQ ID NO: 26986 - protein, 58 aa, Artificial Sequence; identical to SEQ ID NO: 26942
  Synthetic

SEQ ID NO: 26987 - protein, 58 aa, Artificial Sequence; identical to SEQ ID NO: 26918
  Synthetic

SEQ ID NO: 26988 - protein, 58 aa, Artificial Sequence; identical to SEQ ID NO: 26919
  Synthetic

SEQ ID NO: 26989 - protein, 58 aa, Artificial Sequence; identical to SEQ ID NO: 26945
  Synthetic

SEQ ID NO: 26990 - protein, 58 aa, Artificial Sequence
  Synthetic
SAEEVKEELKRIATKLKEEIKENIRRLEESVEKIAKELAENIKRLEDILRDVKRGLRD

SEQ ID NO: 26991 - protein, 58 aa, Artificial Sequence
  Synthetic
SDVDRVLEEIRKLLEDLKRHSEKVSEENEDLLRANTELNKRVSEDNERLLEELKRLRE

SEQ ID NO: 26992 - protein, 58 aa, Artificial Sequence; identical to SEQ ID NO: 26979
  Synthetic

SEQ ID NO: 26993 - protein, 58 aa, Artificial Sequence; identical to SEQ ID NO: 26937
  Synthetic

SEQ ID NO: 26994 - protein, 58 aa, Artificial Sequence
  Synthetic
DREREVKKRLDEVRERIERLLRRVEEESRRVAEEIRRLIEEVRRRNKKVTEEIRELLK

SEQ ID NO: 26995 - protein, 58 aa, Artificial Sequence; identical to SEQ ID NO: 26916
  Synthetic

SEQ ID NO: 26996 - protein, 58 aa, Artificial Sequence; identical to SEQ ID NO: 26967
  Synthetic

SEQ ID NO: 26997 - protein, 58 aa, Artificial Sequence; identical to SEQ ID NO: 26927
  Synthetic

SEQ ID NO: 26998 - protein, 58 aa, Artificial Sequence; identical to SEQ ID NO: 26929
  Synthetic

SEQ ID NO: 26999 - protein, 58 aa, Artificial Sequence; identical to SEQ ID NO: 26932
  Synthetic

SEQ ID NO: 27000 - protein, 58 aa, Artificial Sequence; identical to SEQ ID NO: 26932
  Synthetic

SEQ ID NO: 27001 - protein, 58 aa, Artificial Sequence; identical to SEQ ID NO: 26973
  Synthetic

SEQ ID NO: 27002 - protein, 58 aa, Artificial Sequence; identical to SEQ ID NO: 26942
  Synthetic

SEQ ID NO: 27003 - protein, 58 aa, Artificial Sequence; identical to SEQ ID NO: 26976
  Synthetic

SEQ ID NO: 27004 - protein, 58 aa, Artificial Sequence
  Synthetic
DAVEEAEKLIRKVIADSEKLLRDLADLNAKSIRRSEKLVEDDRRANEDVIRKLEELRR

SEQ ID NO: 27005 - protein, 58 aa, Artificial Sequence; identical to SEQ ID NO: 26919
  Synthetic

SEQ ID NO: 27006 - protein, 58 aa, Artificial Sequence
  Synthetic
SEIERVKKRLEELLAEVEESTRRLEERLKRLLEEAKRSSEEVEKELRRLLEAVRRGLS

SEQ ID NO: 27007 - protein, 58 aa, Artificial Sequence; identical to SEQ ID NO: 26991
  Synthetic

SEQ ID NO: 27008 - protein, 58 aa, Artificial Sequence; identical to SEQ ID NO: 26979
  Synthetic

SEQ ID NO: 27009 - protein, 58 aa, Artificial Sequence; identical to SEQ ID NO: 26915
  Synthetic

SEQ ID NO: 27010 - protein, 58 aa, Artificial Sequence; identical to SEQ ID NO: 26916
  Synthetic

SEQ ID NO: 27011 - protein, 58 aa, Artificial Sequence; identical to SEQ ID NO: 26952
  Synthetic

SEQ ID NO: 27012 - protein, 58 aa, Artificial Sequence; identical to SEQ ID NO: 26932
  Synthetic

SEQ ID NO: 27013 - protein, 58 aa, Artificial Sequence; identical to SEQ ID NO: 27004
  Synthetic

SEQ ID NO: 27014 - protein, 58 aa, Artificial Sequence; identical to SEQ ID NO: 26936
  Synthetic

SEQ ID NO: 27015 - protein, 58 aa, Artificial Sequence; identical to SEQ ID NO: 26954
  Synthetic

SEQ ID NO: 27016 - protein, 36 aa, Artificial Sequence
  Synthetic
DEARKAIARVKRESKRIVEDAERLIREAAAASEKIS

SEQ ID NO: 27017 - protein, 40 aa, Artificial Sequence
  Synthetic
  MISC_FEATURE (40)..(40): C-terminal biotin
DEARKAIARVKRESKRIVEDAERLIREAAAASEKISGSGK

SEQ ID NO: 27018 - protein, 447 aa, Artificial Sequence
  Synthetic
  MISC_FEATURE (1)..(3): optional
  MISC_FEATURE (43)..(447): optional
  MISC_FEATURE (434)..(434): optional residue for biotinylation of MBP_key
MDPDEARKAIARVKRESKRIVEDAERLIREAAAASEKISREASSGLVPRGSHMKIEEGKLVIWINGDKGYNGLAEVGKKFEKDTGIKVTVEHPDKLEEKFPQVAATGDGPDIIFWAHDRFGGYAQSGLLAEITPDKAFQDKLYPFTWDAVRYNGKLIAYPIAVEALSLIYNKDLLPNPPKTWEEIPALDKELKAKGKSALMFNLQEPYFTWPLIAADGGYAFKYENGKYDIKDVGVDNAGAKAGLTFLVDLIKNKHMNADTDYSIAEAAFNKGETAMTINGPWAWSNIDTSKVNYGVTVLPTFKGQPSKPFVGVLSAGINAASPNKELAKEFLENYLLTDEGLEAVNKDKPLGAVALKSYEEELVKDPRIAATMENAQKGEIMPNIPQMSAFWYAVRTAVINAASGRQTVDEALKDAQTNSSGSGLNDIFEAQKIEWHELEHHHHHH

SEQ ID NO: 27019 - protein, 455 aa, Artificial Sequence
  Synthetic
  MISC_FEATURE (1)..(3): optional
  MISC_FEATURE (51)..(455): optional
  MISC_FEATURE (442)..(442): optional residue for biotinylation of MBP_key
MDPDEARKAIARVKRESKRIVEDAERLIREAAAASEKISREAERLIREAASSGLVPRGSHMKIEEGKLVIWINGDKGYNGLAEVGKKFEKDTGIKVTVEHPDKLEEKFPQVAATGDGPDIIFWAHDRFGGYAQSGLLAEITPDKAFQDKLYPFTWDAVRYNGKLIAYPIAVEALSLIYNKDLLPNPPKTWEEIPALDKELKAKGKSALMFNLQEPYFTWPLIAADGGYAFKYENGKYDIKDVGVDNAGAKAGLTFLVDLIKNKHMNADTDYSIAEAAFNKGETAMTINGPWAWSNIDTSKVNYGVTVLPTFKGQPSKPFVGVLSAGINAASPNKELAKEFLENYLLTDEGLEAVNKDKPLGAVALKSYEEELVKDPRIAATMENAQKGEIMPNIPQMSAFWYAVRTAVINAASGRQTVDEALKDAQTNSSGSGLNDIFEAQKIEWHELEHHHHHH

SEQ ID NO: 27020 - protein, 464 aa, Artificial Sequence
  Synthetic
  MISC_FEATURE (1)..(3): optional
  MISC_FEATURE (60)..(464): optional
  MISC_FEATURE (451)..(451): optional residue for biotinylation of MBP_key
MDPDEARKAIARVKRESKRIVEDAERLIREAAAASEKISREAERLIREAAAASEKISRESSGLVPRGSHMKIEEGKLVIWINGDKGYNGLAEVGKKFEKDTGIKVTVEHPDKLEEKFPQVAATGDGPDIIFWAHDRFGGYAQSGLLAEITPDKAFQDKLYPFTWDAVRYNGKLIAYPIAVEALSLIYNKDLLPNPPKTWEEIPALDKELKAKGKSALMFNLQEPYFTWPLIAADGGYAFKYENGKYDIKDVGVDNAGAKAGLTFLVDLIKNKHMNADTDYSIAEAAFNKGETAMTINGPWAWSNIDTSKVNYGVTVLPTFKGQPSKPFVGVLSAGINAASPNKELAKEFLENYLLTDEGLEAVNKDKPLGAVALKSYEEELVKDPRIAATMENAQKGEIMPNIPQMSAFWYAVRTAVINAASGRQTVDEALKDAQTNSSGSGLNDIFEAQKIEWHELEHHHHHH

SEQ ID NO: 27021 - protein, 456 aa, Artificial Sequence
  Synthetic
  MISC_FEATURE (1)..(400)
  MISC_FEATURE (439)..(456)
MGSSHHHHHHSSGLVPRGSHMKIEEGKLVIWINGDKGYNGLAEVGKKFEKDTGIKVTVEHPDKLEEKFPQVAATGDGPDIIFWAHDRFGGYAQSGLLAEITPDKAFQDKLYPFTWDAVRYNGKLIAYPIAVEALSLIYNKDLLPNPPKTWEEIPALDKELKAKGKSALMFNLQEPYFTWPLIAADGGYAFKYENGKYDIKDVGVDNAGAKAGLTFLVDLIKNKHMNADTDYSIAEAAFNKGETAMTINGPWAWSNIDTSKVNYGVTVLPTFKGQPSKPFVGVLSAGINAASPNKELAKEFLENYLLTDEGLEAVNKDKPLGAVALKSYEEELVKDPRIAATMENAQKGEIMPNIPQMSAFWYAVRTAVINAASGRQTVDEALKDAQTNSGSGSGENLYFQDEARKAIARVKRESKRIVEDAERLIREAAAASEKISREAERLIREAAAASEKISRE

SEQ ID NO: 27022 - protein, 445 aa, Artificial Sequence
  Synthetic
  MISC_FEATURE (1)..(1): optional
  MISC_FEATURE (58)..(445): optional
MNKEEIEKLAKEAREKLKKAEKEHKEIHDKLRKKNKKAREDLKKKADELRETNKRVNGSENLYFQGSGSGKIEEGKLVIWINGDKGYNGLAEVGKKFEKDTGIKVTVEHPDKLEEKFPQVAATGDGPDIIFWAHDRFGGYAQSGLLAEITPDKAFQDKLYPFTWDAVRYNGKLIAYPIAVEALSLIYNKDLLPNPPKTWEEIPALDKELKAKGKSALMFNLQEPYFTWPLIAADGGYAFKYENGKYDIKDVGVDNAGAKAGLTFLVDLIKNKHMNADTDYSIAEAAFNKGETAMTINGPWAWSNIDTSKVNYGVTVLPTFKGQPSKPFVGVLSAGINAASPNKELAKEFLENYLLTDEGLEAVNKDKPLGAVALKSYEEELVKDPRIAATMENAQKGEIMPNIPQMSAFWYAVRTAVINAASGRQTVDEALKDAQTNLEHHHHHH

SEQ ID NO: 27023 - protein, 445 aa, Artificial Sequence
  Synthetic
  MISC_FEATURE (1)..(1): optional
  MISC_FEATURE (58)..(445): optional
MSSEKVRRELKESLKENHKQNQKLLKDHKRAQEKLNRELEELKKKHKKTLDDIRRESGSENLYFQGSGSGKIEEGKLVIWINGDKGYNGLAEVGKKFEKDTGIKVTVEHPDKLEEKFPQVAATGDGPDIIFWAHDRFGGYAQSGLLAEITPDKAFQDKLYPFTWDAVRYNGKLIAYPIAVEALSLIYNKDLLPNPPKTWEEIPALDKELKAKGKSALMFNLQEPYFTWPLIAADGGYAFKYENGKYDIKDVGVDNAGAKAGLTFLVDLIKNKHMNADTDYSIAEAAFNKGETAMTINGPWAWSNIDTSKVNYGVTVLPTFKGQPSKPFVGVLSAGINAASPNKELAKEFLENYLLTDEGLEAVNKDKPLGAVALKSYEEELVKDPRIAATMENAQKGEIMPNIPQMSAFWYAVRTAVINAASGRQTVDEALKDAQTNLEHHHHHH

SEQ ID NO: 27024 - protein, 445 aa, Artificial Sequence
  Synthetic
  MISC_FEATURE (1)..(1): optional
  MISC_FEATURE (58)..(445): optional
MDTVKRILEELRRRFEKLAKDLDDIARKLLEDHKKHNKELKDKQRKIKKEADDAARSGSENLYFQGSGSGKIEEGKLVIWINGDKGYNGLAEVGKKFEKDTGIKVTVEHPDKLEEKFPQVAATGDGPDIIFWAHDRFGGYAQSGLLAEITPDKAFQDKLYPFTWDAVRYNGKLIAYPIAVEALSLIYNKDLLPNPPKTWEEIPALDKELKAKGKSALMFNLQEPYFTWPLIAADGGYAFKYENGKYDIKDVGVDNAGAKAGLTFLVDLIKNKHMNADTDYSIAEAAFNKGETAMTINGPWAWSNIDTSKVNYGVTVLPTFKGQPSKPFVGVLSAGINAASPNKELAKEFLENYLLTDEGLEAVNKDKPLGAVALKSYEEELVKDPRIAATMENAQKGEIMPNIPQMSAFWYAVRTAVINAASGRQTVDEALKDAQTNLEHHHHHH

SEQ ID NO: 27025 - protein, 445 aa, Artificial Sequence
  Synthetic
  MISC_FEATURE (1)..(1): optional
  MISC_FEATURE (58)..(445): optional
MDDVERRLRKANKESKKEAEELTEEAKKANEKTKEDSKELTKENRKTNKTIKDEARSGSENLYFQGSGSGKIEEGKLVIWINGDKGYNGLAEVGKKFEKDTGIKVTVEHPDKLEEKFPQVAATGDGPDIIFWAHDRFGGYAQSGLLAEITPDKAFQDKLYPFTWDAVRYNGKLIAYPIAVEALSLIYNKDLLPNPPKTWEEIPALDKELKAKGKSALMFNLQEPYFTWPLIAADGGYAFKYENGKYDIKDVGVDNAGAKAGLTFLVDLIKNKHMNADTDYSIAEAAFNKGETAMTINGPWAWSNIDTSKVNYGVTVLPTFKGQPSKPFVGVLSAGINAASPNKELAKEFLENYLLTDEGLEAVNKDKPLGAVALKSYEEELVKDPRIAATMENAQKGEIMPNIPQMSAFWYAVRTAVINAASGRQTVDEALKDAQTNLEHHHHHH

SEQ ID NO: 27026 - protein, 445 aa, Artificial Sequence
  Synthetic
  MISC_FEATURE (1)..(1): optional
  MISC_FEATURE (58)..(445): optional
MDDEERRSEKTVQDAKREIKKVEDDLQRLNEEQKKKVKKQEDENQKTLKKHKDDARSGSENLYFQGSGSGKIEEGKLVIWINGDKGYNGLAEVGKKFEKDTGIKVTVEHPDKLEEKFPQVAATGDGPDIIFWAHDRFGGYAQSGLLAEITPDKAFQDKLYPFTWDAVRYNGKLIAYPIAVEALSLIYNKDLLPNPPKTWEEIPALDKELKAKGKSALMFNLQEPYFTWPLIAADGGYAFKYENGKYDIKDVGVDNAGAKAGLTFLVDLIKNKHMNADTDYSIAEAAFNKGETAMTINGPWAWSNIDTSKVNYGVTVLPTFKGQPSKPFVGVLSAGINAASPNKELAKEFLENYLLTDEGLEAVNKDKPLGAVALKSYEEELVKDPRIAATMENAQKGEIMPNIPQMSAFWYAVRTAVINAASGRQTVDEALKDAQTNLEHHHHHH

SEQ ID NO: 27027 - protein, 456 aa, Artificial Sequence
  Synthetic
  MISC_FEATURE (1)..(400): optional
  misc_feature (443)..(443): Xaa can be any naturally occurring amino acid
  misc_feature (453)..(453): Xaa can be any naturally occurring amino acid
MGSSHHHHHHSSGLVPRGSHMKIEEGKLVIWINGDKGYNGLAEVGKKFEKDTGIKVTVEHPDKLEEKFPQVAATGDGPDIIFWAHDRFGGYAQSGLLAEITPDKAFQDKLYPFTWDAVRYNGKLIAYPIAVEALSLIYNKDLLPNPPKTWEEIPALDKELKAKGKSALMFNLQEPYFTWPLIAADGGYAFKYENGKYDIKDVGVDNAGAKAGLTFLVDLIKNKHMNADTDYSIAEAAFNKGETAMTINGPWAWSNIDTSKVNYGVTVLPTFKGQPSKPFVGVLSAGINAASPNKELAKEFLENYLLTDEGLEAVNKDKPLGAVALKSYEEELVKDPRIAATMENAQKGEIMPNIPQMSAFWYAVRTAVINAASGRQTVDEALKDAQTNSGSGSGENLYFQDEARKAIARVKRESKRIVEDAERLIREAAAASEKISREAERLXREAAAASEKXSRE

SEQ ID NO: 27028 - protein, 444 aa, Artificial Sequence
  Synthetic
  MISC_FEATURE (1)..(400): optional
  misc_feature (435)..(435): Xaa can be any naturally occurring amino acid
  misc_feature (443)..(443): Xaa can be any naturally occurring amino acid
MGSSHHHHHHSSGLVPRGSHMKIEEGKLVIWINGDKGYNGLAEVGKKFEKDTGIKVTVEHPDKLEEKFPQVAATGDGPDIIFWAHDRFGGYAQSGLLAEITPDKAFQDKLYPFTWDAVRYNGKLIAYPIAVEALSLIYNKDLLPNPPKTWEEIPALDKELKAKGKSALMFNLQEPYFTWPLIAADGGYAFKYENGKYDIKDVGVDNAGAKAGLTFLVDLIKNKHMNADTDYSIAEAAFNKGETAMTINGPWAWSNIDTSKVNYGVTVLPTFKGQPSKPFVGVLSAGINAASPNKELAKEFLENYLLTDEGLEAVNKDKPLGAVALKSYEEELVKDPRIAATMENAQKGEIMPNIPQMSAFWYAVRTAVINAASGRQTVDEALKDAQTNSGSGSGENLYFQDEARKAIARVKRESKRIVEDAERLIREAAAASEKXSREAERLXR

SEQ ID NO: 27029 - protein, 456 aa, Artificial Sequence
  Synthetic
  MISC_FEATURE (1)..(400): optional
  misc_feature (443)..(443): Xaa can be any naturally occurring amino acid
  misc_feature (453)..(453): Xaa can be any naturally occurring amino acid
MGSSHHHHHHSSGLVPRGSHMKIEEGKLVIWINGDKGYNGLAEVGKKFEKDTGIKVTVEHPDKLEEKFPQVAATGDGPDIIFWAHDRFGGYAQSGLLAEITPDKAFQDKLYPFTWDAVRYNGKLIAYPIAVEALSLIYNKDLLPNPPKTWEEIPALDKELKAKGKSALMFNLQEPYFTWPLIAADGGYAFKYENGKYDIKDVGVDNAGAKAGLTFLVDLIKNKHMNADTDYSIAEAAFNKGETAMTINGPWAWSNIDTSKVNYGVTVLPTFKGQPSKPFVGVLSAGINAASPNKELAKEFLENYLLTDEGLEAVNKDKPLGAVALKSYEEELVKDPRIAATMENAQKGEIMPNIPQMSAFWYAVRTAVINAASGRQTVDEALKDAQTNSGSGSGENLYFQDEARKAIARVKRESKRIVEDAERLIREAAQASEKISREARELXERAAQASEKXSRE

SEQ ID NO: 27030 - protein, 444 aa, Artificial Sequence
  Synthetic
  MISC_FEATURE (1)..(400): optional
  misc_feature (435)..(435): Xaa can be any naturally occurring amino acid
  misc_feature (443)..(443): Xaa can be any naturally occurring amino acid
MGSSHHHHHHSSGLVPRGSHMKIEEGKLVIWINGDKGYNGLAEVGKKFEKDTGIKVTVEHPDKLEEKFPQVAATGDGPDIIFWAHDRFGGYAQSGLLAEITPDKAFQDKLYPFTWDAVRYNGKLIAYPIAVEALSLIYNKDLLPNPPKTWEEIPALDKELKAKGKSALMFNLQEPYFTWPLIAADGGYAFKYENGKYDIKDVGVDNAGAKAGLTFLVDLIKNKHMNADTDYSIAEAAFNKGETAMTINGPWAWSNIDTSKVNYGVTVLPTFKGQPSKPFVGVLSAGINAASPNKELAKEFLENYLLTDEGLEAVNKDKPLGAVALKSYEEELVKDPRIAATMENAQKGEIMPNIPQMSAFWYAVRTAVINAASGRQTVDEALKDAQTNSGSGSGENLYFQDEARKAIARVKRESKRIVEDAERLIREAAQASEKXSREAERLXR

SEQ ID NO: 27031 - protein, 80 aa, Artificial Sequence
  Synthetic
  MISC_FEATURE (1)..(24): optional
MGSHHHHHHGSGSENLYFQGSGGSDEARKAIARVKRESKRIVEDAEGLISEAAAASEKISREAERLIREAAAASEKISRE

SEQ ID NO: 27032 - protein, 80 aa, Artificial Sequence
  Synthetic
  MISC_FEATURE (1)..(24): optional
MGSHHHHHHGSGSENLYFQGSGGSDEARKAIARVKRESKRIVEDAERLIREAAGSSEKISREAERLIREAAAASEKISRE

SEQ ID NO: 27033 - protein, 80 aa, Artificial Sequence
  Synthetic
  MISC_FEATURE (1)..(24): optional
MGSHHHHHHGSGSENLYFQGSGGSDEARKAIARVKRESKRIVEDAERLIGEAAAASEKISREAERLIREAAAASEKISRE

SEQ ID NO: 27034 - protein, 68 aa, Artificial Sequence
  Synthetic
  MISC_FEATURE (1)..(24): optional
MGSHHHHHHGSGSENLYFQGSGGSDEARKAIARVKRESKRIVGDAERLIREAAAASEKISREAERLIR

SEQ ID NO: 27035 - protein, 68 aa, Artificial Sequence
  Synthetic
  MISC_FEATURE (1)..(24): optional
MGSHHHHHHGSGSENLYFQGSGGSDEARKAIARVKRESKRIVEDAEGLISEAAAASEKISREAERLIR

SEQ ID NO: 27036 - protein, 68 aa, Artificial Sequence
  Synthetic
  MISC_FEATURE (1)..(24): optional
MGSHHHHHHGSGSENLYFQGSGGSDEARKAIARVAEESKRIVEDAERLIREAAAASEKISREAERLIR

SEQ ID NO: 27037 - protein, 68 aa, Artificial Sequence
  Synthetic
  MISC_FEATURE (1)..(24): optional
MGSHHHHHHGSGSENLYFQGSGGSDEAAKAIARVAEESKRIVEDAERLIREAAAASEKISREAERLIR

SEQ ID NO: 27038 - protein, 68 aa, Artificial Sequence
  Synthetic
  MISC_FEATURE (1)..(24): optional
MGSHHHHHHGSGSENLYFQGSGGSDEARKAIARVKRESKRIVEDAERLIREAAEASEEISREAERLIR

SEQ ID NO: 27039 - protein, 492 aa, Artificial Sequence
  Synthetic
  MISC_FEATURE (1)..(404): optional
  misc_feature (447)..(447): Xaa can be any naturally occurring amino acid
  misc_feature (457)..(457): Xaa can be any naturally occurring amino acid
  MISC_FEATURE (461)..(479): optional
MGSHHHHHHGSGSENLYFQGSGGSMKIEEGKLVIWINGDKGYNGLAEVGKKFEKDTGIKVTVEHPDKLEEKFPQVAATGDGPDIIFWAHDRFGGYAQSGLLAEITPDKAFQDKLYPFTWDAVRYNGKLIAYPIAVEALSLIYNKDLLPNPPKTWEEIPALDKELKAKGKSALMFNLQEPYFTWPLIAADGGYAFKYENGKYDIKDVGVDNAGAKAGLTFLVDLIKNKHMNADTDYSIAEAAFNKGETAMTINGPWAWSNIDTSKVNYGVTVLPTFKGQPSKPFVGVLSAGINAASPNKELAKEFLENYLLTDEGLEAVNKDKPLGAVALKSYEEELVKDPRIAATMENAQKGEIMPNIPQMSAFWYAVRTAVINAASGRQTVDEALKDAQTNSGSGSGENLYFQDEARKAIARVKRESKRIVEDAERLIREAAAASEKISREAERLXREAAAASEKXSREGGGSGSGSGSGKPGQASGSAHIVMVDAYKPTK

SEQ ID NO: 27040 - protein, 480 aa, Artificial Sequence
  Synthetic
  MISC_FEATURE (1)..(404): optional
  misc_feature (439)..(439): Xaa can be any naturally occurring amino acid
  misc_feature (447)..(447): Xaa can be any naturally occurring amino acid
  MISC_FEATURE (449)..(467): optional
MGSHHHHHHGSGSENLYFQGSGGSMKIEEGKLVIWINGDKGYNGLAEVGKKFEKDTGIKVTVEHPDKLEEKFPQVAATGDGPDIIFWAHDRFGGYAQSGLLAEITPDKAFQDKLYPFTWDAVRYNGKLIAYPIAVEALSLIYNKDLLPNPPKTWEEIPALDKELKAKGKSALMFNLQEPYFTWPLIAADGGYAFKYENGKYDIKDVGVDNAGAKAGLTFLVDLIKNKHMNADTDYSIAEAAFNKGETAMTINGPWAWSNIDTSKVNYGVTVLPTFKGQPSKPFVGVLSAGINAASPNKELAKEFLENYLLTDEGLEAVNKDKPLGAVALKSYEEELVKDPRIAATMENAQKGEIMPNIPQMSAFWYAVRTAVINAASGRQTVDEALKDAQTNSGSGSGENLYFQDEARKAIARVKRESKRIVEDAERLIREAAAASEKXSREAERLXRGGGSGSGSGSGKPGQASGSAHIVMVDAYKPTK

SEQ ID NO: 27041 - protein, 510 aa, Artificial Sequence
  Synthetic
  MISC_FEATURE (1)..(454): optional
MGSSHHHHHHSSGLVPRGSHMSKGEELFTGVVPILVELDGDVNGHKFSVRGEGEGDATNGKLTLKFICTTGKLPVPWPTLVTTLTYGVQCFARYPDHMKQHDFFKSAMPEGYVQERTISFKDDGTYKTRAEVKFEGDTLVNRIELKGIDFKEDGNILGHKLEYNFNSHNVYITADKQKNGIKANFKIRHNVEDGSVQLADHYQQNTPIGDGPVLLPDNHYLSTQSVLSKDPNEKRDHMVLLEFVTAAGITHGMDELYKSGSGSGCFAKGTNVLMADGSIECIENIEVGNKVMGKDGRPREVIKLPRGRETMYSVVQKSQHRAHKSDSSREVPELLKFTCNATHELVVRTPRSVRRLSRTIKGVEYFEVITFEMGQKKAPDGRIVELVKEVSKSYPISEGPERANELVESYRKASNKAYFEWTIEARDLSLLGSHVRKATYQTYAPILYGGSGGSDEARKAIARVKRESKRIVEDAERLIREAAAASEKISREAERLIREAAAASEKISRE

SEQ ID NO: 27042 - protein, 394 aa, Artificial Sequence
  Synthetic
  MISC_FEATURE (1)..(22): optional
  MISC_FEATURE (79)..(394): optional
MGSHHHHHHGSGSENLYFQGSGDEARKAIARVKRESKRIVEDAERLIREAAAASEKISREAERLIREAAAASEKISREGSGGSGSGGGVLLNVLSKCAGSKKFRPAPAAAFARECRGFYFELQELKEDDYYGITLSDDSDHQFLLANQVVVHNCGSGGSVSKGEEDNMAIIKEFMRFKVHMEGSVNGHEFEIEGEGEGRPYEGTQTAKLKVTKGGPLPFAWDILSPQFMYGSKAYVKHPADIPDYLKLSFPEGFKWERVMNFEDGGVVTVTQDSSLQDGEFIYKVKLRGTNFPSDGPVMQKKTMGWEASSERMYPEDGALKGEIKQRLKLKDGGHYDAEVKTTYKAKKPVQLPGAYNVNIKLDITSHNEDYTIVEQYERAEGRHSTGGMDELYK

SEQ ID NO: 27043 - protein, 58 aa, Artificial Sequence
  Synthetic
DKVRKVAEVAEKVLRDIDKLDRESKEAFRRTNGEISKLDEDTRRVAERVKKAIEDLAK

SEQ ID NO: 27044 - protein, 54 aa, Artificial Sequence
  Synthetic
SEVDEIIADNERALDEVRREVEEIDKENAERLKEWVEEAREILDRLAKALEEIR

SEQ ID NO: 27045 - protein, 60 aa, Artificial Sequence
  Synthetic
PEEALSKAIKDVRDIVKKVKDELKEWRDRNKELVDRLSEELKEWLKDVERVLKELTDKDR

SEQ ID NO: 27046 - protein, 56 aa, Artificial Sequence; identical to SEQ ID NO: 26790
  Synthetic

SEQ ID NO: 27047 - protein, 59 aa, Artificial Sequence
  Synthetic
SRLVKKLDEIVKEVAKKLEDVVRANEELWRKLVELNKESVARLREAVERVARDLEETAR

SEQ ID NO: 27048 - protein, 54 aa, Artificial Sequence
  Synthetic
SDEERLEKVVKDVIEKVRRILEKWKKDIDKVVKELRRILEEWEKIIREVLDKVR

SEQ ID NO: 27049 - protein, 57 aa, Artificial Sequence
  Synthetic
DKDAVIKVIEKLIRANAAVWDALLKINEDLVRVNKTVWKELLRVNEKLARDLERVVK

SEQ ID NO: 27050 - protein, 55 aa, Artificial Sequence
  Synthetic
SLVDELRKSLERNVRVSEEVARRLKEALKRWVDVVRKVVEDLIRLNEDVVRVVEK

SEQ ID NO: 27051 - protein, 59 aa, Artificial Sequence; identical to SEQ ID NO: 27047
  Synthetic

SEQ ID NO: 27052 - protein, 16 aa, Artificial Sequence
  Synthetic
RDHMVLHEYVNAAGIT

SEQ ID NO: 27053 - protein, 6 aa, Artificial Sequence
  Synthetic
RLVGFE

SEQ ID NO: 27054 - protein, 13 aa, Artificial Sequence
  Synthetic
  MISC_FEATURE (11)..(13): optional
AHIVMVDAYKPTK

SEQ ID NO: 27055 - protein, 9 aa, Artificial Sequence
  Synthetic
AAAKRARTS

SEQ ID NO: 27056 - protein, 11 aa, Artificial Sequence
  Synthetic
LALKLAGLDIN

SEQ ID NO: 27057 - protein, 12 aa, Artificial Sequence
  Synthetic
ELAEKLAGLDIN

SEQ ID NO: 27058 - protein, 13 aa, Artificial Sequence
  Synthetic
ELAEKLRAGLDLN

SEQ ID NO: 27059 - protein, 27 aa, Artificial Sequence
  Synthetic
TMFSSNRQKILERTETLNQEWKQRRIQ

SEQ ID NO: 27060 - protein, 10 aa, Artificial Sequence
  Synthetic
ETFSDLWKLL

SEQ ID NO: 27061 - protein, 33 aa, Artificial Sequence
  Synthetic
GELDELVYLLDGPGYDPIHSDVVTRGGSHLFNF

SEQ ID NO: 27062 - protein, 12 aa, Artificial Sequence
  Synthetic
TMDDVYNYLFDD

SEQ ID NO: 27063 - protein, 13 aa, Artificial Sequence
  Synthetic
LLTGLFVQYLFDD

SEQ ID NO: 27064 - protein, 11 aa, Artificial Sequence
  Synthetic
DDAVVESFFSS

SEQ ID NO: 27065 - protein, 9 aa, Artificial Sequence
  Synthetic
GDFLSDLFD

SEQ ID NO: 27066 - protein, 9 aa, Artificial Sequence
  Synthetic
GDVLSDLVD

SEQ ID NO: 27067 - protein, 13 aa, Artificial Sequence
  Synthetic
NIQMLLEAADYLE

SEQ ID NO: 27068 - protein, 13 aa, Artificial Sequence
  Synthetic
NIAMLLAAAAYLE

SEQ ID NO: 27069 - protein, 4 aa, Artificial Sequence
  Synthetic
IQIG

SEQ ID NO: 27070 - protein, 4 aa, Artificial Sequence
  Synthetic
VQLG

SEQ ID NO: 27071 - protein, 11 aa, Artificial Sequence
  Synthetic
VSGWRLFKKIS

SEQ ID NO: 27072 - protein, 27 aa, Artificial Sequence
  Synthetic
GLEQEIAALEKENAALEWEIAALEQGG

SEQ ID NO: 27073 - protein, 27 aa, Artificial Sequence
  Synthetic
GLKQKIAALKYKNAALKKKIAALKQGG

SEQ ID NO: 27074 - protein, 33 aa, Artificial Sequence
  Synthetic
RMKQLEDKVEELLSKNYHLENEVARLKKLVGER

SEQ ID NO: 27075 - protein, 30 aa, Artificial Sequence
  Synthetic
GEIAALKQEIAALKKENAALKWEIAALKQG

SEQ ID NO: 27076 - protein, 30 aa, Artificial Sequence
  Synthetic
WEAALAEALAEALAEHLAEALAEALEALAA

SEQ ID NO: 27077 - protein, 13 aa, Artificial Sequence
  Synthetic
GLFDIIKKIAESF

SEQ ID NO: 27078 - protein, 23 aa, Artificial Sequence
  Synthetic
GIGKFLHSAGKFGKAFVGEIMKS

SEQ ID NO: 27079 - protein, 23 aa, Artificial Sequence
  Synthetic
GIGKFLHSAKKFGKAFVGEIMNS

SEQ ID NO: 27080 - protein, 26 aa, Artificial Sequence
  Synthetic
GIGAVLKVLTTGLPALISWIKRKRQQ

SEQ ID NO: 27081 - protein, 14 aa, Artificial Sequence
  Synthetic
INWKGIAAMAKKLL

SEQ ID NO: 27082 - protein, 37 aa, Artificial Sequence
  Synthetic
KWKLFKKIEKVGQNIRDGIIKAGPAVAVVGQATQIAK

SEQ ID NO: 27083 - protein, 31 aa, Artificial Sequence
  Synthetic
SWLSKTAKKLENSAKKRISEGIAIAIQGGPR

SEQ ID NO: 27084 - protein, 16 aa, Artificial Sequence
  Synthetic
GLFDVIKKVASVIGGL

SEQ ID NO: 27085 - protein, 14 aa, Artificial Sequence
  Synthetic
NFLGTLINLAKKIL

SEQ ID NO: 27086 - protein, 23 aa, Artificial Sequence
  Synthetic
SYFILRRRRKRFPYFFTDVRVAA

SEQ ID NO: 27087 - protein, 21 aa, Artificial Sequence
  Synthetic
AFSWGSLWSGIKNFGSTVKNY

SEQ ID NO: 27088 - protein, 21 aa, Artificial Sequence
  Synthetic
ASMWERVKSIIKSSLAAASNI

SEQ ID NO: 27089 - protein, 50 aa, Artificial Sequence
  Synthetic
VTSTITEKLLKNLIKIISSLVIITRNYEDTTTVLATLALLGCDASPWQWL

SEQ ID NO: 27090 - protein, 24 aa, Artificial Sequence
  Synthetic
IAQNPVENYIDEVLNEVLVVPNIN

SEQ ID NO: 27091 - protein, 20 aa, Artificial Sequence
  Synthetic
FLGIAEAIDIGNGWEGMEFG

SEQ ID NO: 27092 - protein, 20 aa, Artificial Sequence
  Synthetic
GLFGAIAGFIENGWEGMIDG

SEQ ID NO: 27093 - protein, 23 aa, Artificial Sequence
  Synthetic
GLFGAIAGFIENGWEGMIDGWYG

SEQ ID NO: 27094 - protein, 285 aa, Artificial Sequence; identical to SEQ ID NO: 67
  Synthetic

SEQ ID NO: 27095 - protein, 236 aa, Artificial Sequence
  Synthetic
MSLVDELEIWIAQELRRIGDEFNAYYAALKRWVDVVRKVVEDLIRLNEDVVRVVEKVGVDESAIERVRRIIEELNRALDAVLKKNEDLVRRLTELLDKLLEENRRLVEELDEDLKRRGGTEEVIDTILELIERSIERLKRLLDELLRIVREALKDNARVADENLKALKEILDELRKDGVSDEELKRVLEKAADLHARLKDAHRKLLEDLERIIRELKKKLDEVVEENKRSVDELKR

SEQ ID NO: 27096 - protein, 237 aa, Artificial Sequence; identical to SEQ ID NO: 90
  Synthetic

SEQ ID NO: 27097 - protein, 175 aa, Artificial Sequence; identical to SEQ ID NO: 91
  Synthetic

SEQ ID NO: 27098 - protein, 289 aa, Artificial Sequence
  Synthetic
MSELARKLLEASTKLQRLNIRLAEALLEAIARLQELNLELVYLAVELTDPKRIRDEIKEVKDKSKEIIRRAEKEIDDAAKESEKILEEAREAISGSGSELAKLLLKAIAETQDLNLRAAKAFLEAAAKLQELNIRAVELLVKLTDPATIREALEHAKRRSKEIIDEAERAIRAAKRESERIIEEARRLIEKGSGSGSELARELLRAHAQLQRLNLELLRELLRALAQLQELNLDLLRLASELTDPDEARAHIVMVDAYKKRIVEDAERLIREAAAASEKISREAERLIR

SEQ ID NO: 27099 - protein, 289 aa, Artificial Sequence
  Synthetic
MSELARKLLEASTKLQRLNIRLAEALLEAIARLQELNLELVYLAVELTDPKRIRDEIKEVKDKSKEIIRRAEKEIDDAAKESEKILEEAREAISGSGSELAKLLLKAIAETQDLNLRAAKAFLEAAAKLQELNIRAVELLVKLTDPATIREALEHAKRRSKEIIDEAERAIRAAKRESERIIEEARRLIEKGSGSGSELARELLRAHAQLQRLNLELLRELLRALAQLQELNLDLLRLASELTDPDEARKAIARVKRESKAHIVMVDAYKREAAAASEKISREAERLIR

SEQ ID NO: 27100 - protein, 289 aa, Artificial Sequence
  Synthetic
MSELARKLLEASTKLQRLNIRLAEALLEAIARLQELNLELVYLAVELTDPKRIRDEIKEVKDKSKEIIRRAEKEIDDAAKESEKILEEAREAISGSGSELAKLLLKAIAETQDLNLRAAKAFLEAAAKLQELNIRAVELLVKLTDPATIREALEHAKRRSKEIIDEAERAIRAAKRESERIIEEARRLIEKGSGSGSELARELLRAHAQLQRLNLELLRELLRALAQLQELNLDLLRLASELTDPDEARENLYFQGSESKRIVEDAERLIREAAAASEKISREAERLIR

SEQ ID NO: 27101 - protein, 289 aa, Artificial Sequence
  Synthetic
MSELARKLLEASTKLQRLNIRLAEALLEAIARLQELNLELVYLAVELTDPKRIRDEIKEVKDKSKEIIRRAEKEIDDAAKESEKILEEAREAISGSGSELAKLLLKAIAETQDLNLRAAKAFLEAAAKLQELNIRAVELLVKLTDPATIREALEHAKRRSKEIIDEAERAIRAAKRESERIIEEARRLIEKGSGSGSELARELLRAHAQLQRLNLELLRELLRALAQLQELNLDLLRLASELTDPDEARKAIARVKRESKRIVENLYFQGSEAAAASEKISREAERLIR

SEQ ID NO: 27102 - protein, 289 aa, Artificial Sequence
  Synthetic
MSELARKLLEASTKLQRLNIRLAEALLEAIARLQELNLELVYLAVELTDPKRIRDEIKEVKDKSKEIIRRAEKEIDDAAKESEKILEEAREAISGSGSELAKLLLKAIAETQDLNLRAAKAFLEAAAKLQELNIRAVELLVKLTDPATIREALEHAKRRSKEIIDEAERAIRAAKRESERIIEEARRLIEKGSGSGSELARELLRAHAQLQRLNLELLRELLRALAQLQELNLDLLRLASELTDPDEARVSGWRLFKKISRIVEDAERLIREAAAASEKISREAERLIR

SEQ ID NO: 27103 - protein, 289 aa, Artificial Sequence
  Synthetic
MSELARKLLEASTKLQRLNIRLAEALLEAIARLQELNLELVYLAVELTDPKRIRDEIKEVKDKSKEIIRRAEKEIDDAAKESEKILEEAREAISGSGSELAKLLLKAIAETQDLNLRAAKAFLEAAAKLQELNIRAVELLVKLTDPATIREALEHAKRRSKEIIDEAERAIRAAKRESERIIEEARRLIEKGSGSGSELARELLRAHAQLQRLNLELLRELLRALAQLQELNLDLLRLASELTDPDEARKAIARVKRESKVSGWRLFKKISEAAAASEKISREAERLIR

SEQ ID NO: 27104 - protein, 289 aa, Artificial Sequence
  Synthetic
MSELARKLLEASTKLQRLNIRLAEALLEAIARLQELNLELVYLAVELTDPKRIRDEIKEVKDKSKEIIRRAEKEIDDAAKESEKILEEAREAISGSGSELAKLLLKAIAETQDLNLRAAKAFLEAAAKLQELNIRAVELLVKLTDPATIREALEHAKRRSKEIIDEAERAIRAAKRESERIIEEARRLIEKGSGSGSELARELLRAHAQLQRLNLELLRELLRALAQLQELNLDLLRLASELTDPDEARKAIIQIGRESKRIVEDAERLIREAAAASEKISVQLGRLIR

SEQ ID NO: 27105 - protein, 289 aa, Artificial Sequence
  Synthetic
MSELARKLLEASTKLQRLNIRLAEALLEAIARLQELNLELVYLAVELTDPKRIRDEIKEVKDKSKEIIRRAEKEIDDAAKESEKILEEAREAISGSGSELAKLLLKAIAETQDLNLRAAKAFLEAAAKLQELNIRAVELLVKLTDPATIREALEHAKRRSKEIIDEAERAIRAAKRESERIIEEARRLIEKGSGSGSELARELLRAHAQLQRLNLELLRELLRALAQLQELNLDLLRLASELTDPDEARKAIARVKRESKRIVIQIGRLIVQLGAASEKISREAERLIR

SEQ ID NO: 27106 - protein, 289 aa, Artificial Sequence
  Synthetic
MSELARKLLEASTKLQRLNIRLAEALLEAIARLQELNLELVYLAVELTDPKRIRDEIKEVKDKSKEIIRRAEKEIDDAAKESEKILEEAREAISGSGSELAKLLLKAIAETQDLNLRAAKAFLEAAAKLQELNIRAVELLVKLTDPATIREALEHAKRRSKEIIDEAERAIRAAKRESERIIEEARRLIEKGSGSGSELARELLRAHAQLQRLNLELLRELLRALAQLQELNLDLLRLASELTDPDEARKAIARVKRESKRIVIQIGRLIREAAAASEKISVQLGRLIR

SEQ ID NO: 27107 - protein, 289 aa, Artificial Sequence
  Synthetic
MSELARKLLEASTKLQRLNIRLAEALLEAIARLQELNLELVYLAVELTDPKRIRDEIKEVKDKSKEIIRRAEKEIDDAAKESEKILEEAREAISGSGSELAKLLLKAIAETQDLNLRAAKAFLEAAAKLQELNIRAVELLVKLTDPATIREALEHAKRRSKEIIDEAERAIRAAKRESERIIEEARRLIEKGSGSGSELARELLRAHAQLQRLNLELLRELLRALAQLQELNLDLLRLASELTDPDESVKELEDKVEELLSKNYHLENEVARLKKLVGERSREAERLIR

SEQ ID NO: 27108 - protein, 289 aa, Artificial Sequence
  Synthetic
MSELARKLLEASTKLQRLNIRLAEALLEAIARLQELNLELVYLAVELTDPKRIRDEIKEVKDKSKEIIRRAEKEIDDAAKESEKILEEAREAISGSGSELAKLLLKAIAETQDLNLRAAKAFLEAAAKLQELNIRAVELLVKLTDPATIREALEHAKRRSKEIIDEAERAIRAAKRESERIIEEARRLIEKGSGSGSELARELLRAHAQLQRLNLELLRELLRALAQLQELNLDLLRLASELTDPDEARKAIAGEIAALKQEIAALKKENAALKWEIAALKQGAERLIR

SEQ ID NO: 27109 - protein, 289 aa, Artificial Sequence
  Synthetic
MSELARKLLEASTKLQRLNIRLAEALLEAIARLQELNLELVYLAVELTDPKRIRDEIKEVKDKSKEIIRRAEKEIDDAAKESEKILEEAREAISGSGSELAKLLLKAIAETQDLNLRAAKAFLEAAAKLQELNIRAVELLVKLTDPATIREALEHAKRRSKEIIDEAERAIRAAKRESERIIEEARRLIEKGSGSGSELARELLRAHAQLQRLNLELLRELLRALAQLQELNLDLLRLASELTDPDEARKAIARVKRGLEQEIAALEKENAALEWEIAALEQGGERLIR

SEQ ID NO: 27110 - protein, 289 aa, Artificial Sequence
  Synthetic
MSELARKLLEASTKLQRLNIRLAEALLEAIARLQELNLELVYLAVELTDPKRIRDEIKEVKDKSKEIIRRAEKEIDDAAKESEKILEEAREAISGSGSELAKLLLKAIAETQDLNLRAAKAFLEAAAKLQELNIRAVELLVKLTDPATIREALEHAKRRSKEIIDEAERAIRAAKRESERIIEEARRLIEKGSGSGSELARELLRAHAQLQRLNLELLRELLRALAQLQELNLDLLRLASELTDPDEARKAIARVKRGLKQKIAALKYKNAALKKKIAALKQGGERLIR

SEQ ID NO: 27111 - protein, 288 aa, Artificial Sequence
  Synthetic
SELARKLLEASTKLQRLNIRLAEALLEAIARLQELNLELVYLAVELTDPKRIRDEIKEVKDKSKEIIRRAEKEIDDAAKESEKILEEAREAISGSGSELAKLLLKAIAETQDLNLRAAKAFLEAAAKLQELNIRAVELLVKLTDPATIREALEHAKRRSKEIIDEAERAIRAAKRESERIIEEARRLIEKGSGSGSELARELLRAHAQLQRLNLELLRELLRALAQLQELNLDLLRLASELTDPDEARKAIENLYFQGSRIVEDAEAHIVMVDAYKEKISREAERLIR

SEQ ID NO: 27112 - protein, 288 aa, Artificial Sequence
  Synthetic
SELARKLLEASTKLQRLNIRLAEALLEAIARLQELNLELVYLAVELTDPKRIRDEIKEVKDKSKEIIRRAEKEIDDAAKESEKILEEAREAISGSGSELAKLLLKAIAETQDLNLRAAKAFLEAAAKLQELNIRAVELLVKLTDPATIREALEHAKRRSKEIIDEAERAIRAAKRESERIIEEARRLIEKGSGSGSELARELLRAHAQLQRLNLELLRELLRALAQLQELNLDLLRLASELTDPDEARKAIARVENLYFQGSEDAERLIREAAHIVMVDAYKAERLIR

SEQ ID NO: 27113 - protein, 288 aa, Artificial Sequence
  Synthetic
SELARKLLEASTKLQRLNIRLAEALLEAIARLQELNLELVYLAVELTDPKRIRDEIKEVKDKSKEIIRRAEKEIDDAAKESEKILEEAREAISGSGSELAKLLLKAIAETQDLNLRAAKAFLEAAAKLQELNIRAVELLVKLTDPATIREALEHAKRRSKEIIDEAERAIRAAKRESERIIEEARRLIEKGSGSGSELARELLRAHAQLQRLNLELLRELLRALAQLQELNLDLLRLASELTDPDEARKAIARVKENLYFQGSDAERLIREAAHIVMVDAYKAERLIR

SEQ ID NO: 27114 - protein, 359 aa, Artificial Sequence
  Synthetic
SKEAAKKLQDLNIELARKLLEASTKLQRLNIRLAEALLEAIARLQELNLELVYLAVELTDPKRIRDEIKEVKDKSKEIIRRAEKEIDDAAKESKKILEEARKAIRDAAEESRKILEEGSGSGSDALDELQKLNLELAKLLLKAIAETQDLNLRAAKAFLEAAAKLQELNIRAVELLVKLTDPATIRRALEHAKRRSKEIIDEAERAIRAAKRESERIIEEARRLIEKAKEESERIIREGSGSGDPDIKKLQDLNIELARELLRAHAQLQRLNLELLRELLRALAQLQELNLDLLRLASELTDPDEARKAIARVKENLYFQGSDAERLIREAAAASEAHIVMVDAYKREAAAASEKISRE

SEQ ID NO: 27115 - protein, 359 aa, Artificial Sequence
  Synthetic
SKEAAKKLQDLNIELARKLLEASTKLQRLNIRLAEALLEAIARLQELNLELVYLAVELTDPKRIRDEIKEVKDKSKEIIRRAEKEIDDAAKESKKILEEARKAIRDAAEESRKILEEGSGSGSDALDELQKLNLELAKLLLKAIAETQDLNLRAAKAFLEAAAKLQELNIRAVELLVKLTDPATIRRALEHAKRRSKEIIDEAERAIRAAKRESERIIEEARRLIEKAKEESERIIREGSGSGDPDIKKLQDLNIELARELLRAHAQLQRLNLELLRELLRALAQLQELNLDLLRLASELTDPDEARKAIARVKENLYFQGSDAERLIREAAAASEKISREAEAHIVMVDAYKEKISRE

SEQ ID NO: 27116 - protein, 760 aa, Artificial Sequence
  Synthetic
VSKGEELFTGVVPILVELDGDVNGHKFSVSGEGEGDATYGKLTLKFICTTGKLPVPWPTLVTTLSWGVQCFARYPDHMKQHDFFKSAMPEGYVQERTIFFKDDGNYKTRAEVKFEGDTLVNRIELKGIDFKEDGNILGHKLEYNYFSDNVYITADKQKNGIKANFKIRHNIEDGGVQLADHYQQNTPIGDGPVLLPDNHYLSTQSKLSKDPNEKRDHMVLLEFVTAAGITLELARKLLEASTKLQRLNIRLAEALLEAIARLQELNLELVYLAVELTDPKRIRDEIKEVKDKSKEIIRRAEKEIDDAAKESEKILEEAREAISGSGSELAKLLLKAIAETQDLNLRAAKAFLEAAAKLQELNIRAVELLVKLTDPATIREALEHAKRRSKEIIDEAERAIRAAKRESERIIEEARRLIEKGSGSGSELARELLRAHAQLQRLNLELLRELLRALAQLQELNLDLLRLASELTDEIWIAQELRRIGDEFNAYYADAERLIREAAAASEKISREAERLIRVSKGEELFTGVVPILVELDGDVNGHKFSVSGEGEGDATYGKLTLKLICTTGKLPVPWPTLVTTLGYGVQCFARYPDHMKQHDFFKSAMPEGYVQERTIFFKDDGNYKTRAEVKFEGDTLVNRIELKGIDFKEDGNILGHKLEYNYNSHNVYITADKQKNGIKANFKIRHNIEDGGVQLADHYQQNTPIGDGPVLLPDNHYLSYQSKLSKDPNEKRDHMVLLEFVTAAGITLGMDELYKGSGC

SEQ ID NO: 27117 - protein, 750 aa, Artificial Sequence
  Synthetic
VSKGEELFTGVVPILVELDGDVNGHKFSVSGEGEGDATYGKLTLKFICTTGKLPVPWPTLVTTLSWGVQCFARYPDHMKQHDFFKSAMPEGYVQERTIFFKDDGNYKTRAEVKFEGDTLVNRIELKGIDFKEDGNILGHKLEYNYFSDNVYITADKQKNGIKANFKIRHNIEDGGVQLADHYQQNTPIGDGPVLLPDNHYLSTQSKLSKDPNEKRDHMVLLEFVTAAGITLELARKLLEASTKLQRLNIRLAEALLEAIARLQELNLELVYLAVELTDPKRIRDEIKEVKDKSKEIIRRAEKEIDDAAKESEKILEEAREAISGSGSELAKLLLKAIAETQDLNLRAAKAFLEAAAKLQELNIRAVELLVKLTDPATIREALEHAKRRSKEIIDEAERAIRAAKRESERIIEEARRLIEKGSGSGSELARELLRAHAQLQRLNLELLRELLRALAQLQELNLDLLRLASELTDPDEARKAIARVKRESNAYYADAERLIREAAAASEKVSKGEELFTGVVPILVELDGDVNGHKFSVSGEGEGDATYGKLTLKLICTTGKLPVPWPTLVTTLGYGVQCFARYPDHMKQHDFFKSAMPEGYVQERTIFFKDDGNYKTRAEVKFEGDTLVNRIELKGIDFKEDGNILGHKLEYNYNSHNVYITADKQKNGIKANFKIRHNIEDGGVQLADHYQQNTPIGDGPVLLPDNHYLSYQSKLSKDPNEKRDHMVLLEFVTAAGITLGMDELYKGSGC

SEQ ID NO: 27118 - protein, 75 aa, Artificial Sequence
  Synthetic
MDAKSLTAWSRTLVTFKDVFVDFTREEWKLLDTAQQIVYRNVMLENYKNLVSLGYQLTKPDVILRLEKGEEPWLV

SEQ ID NO: 27119 - protein, 45 aa, Artificial Sequence
  Synthetic
RTLVTFKDVFVDFTREEWKLLDTAQQIVYRNVMLENYKNLVSLGY

SEQ ID NO: 27120 - protein, 407 aa, Artificial Sequence
  Synthetic
MSKEAVTKLQALNIKLAEKLLEAVTKLQALNIKLAEKLLEALARLQELNIALVYLAVELTDPKRIADEIKKVKDKSKEIVERAEEEIARAAAESKKILDEAEEEIARAAAESKKILDEGSGSGSDAVAELQALNLKLAELLLEAVAELQALNLKLAELLLEAIAKLQELNIKLVELLTKLTDPATIREAIRKVKEDSERIVAEAERLIAAAKAESERIIREAERLIAAAKAESERIIREGSGSGDPDVARLQELNIELARELLRDVARLQELNIELARELLRAAAELQELNIKLVELASELTGSRTLVTFKDVFVDFTREEWKLLDTAQQIVYRNVMLENYKNLVSLGYGSDEARKAIARVKRESKRIVEDAERLIREAAAASEKISREAERLIREAAAASEKISRE

SEQ ID NO: 27121 - protein, 394 aa, Artificial Sequence
  Synthetic
MSKEAVTKLQALNIKLAEKLLEAVTKLQALNIKLAEKLLEALARLQELNIALVYLAVELTDPKRIADEIKKVKDKSKEIVERAEEEIARAAAESKKILDEAEEEIARAAAESKKILDEGSGSGSDAVAELQALNLKLAELLLEAVAELQALNLKLAELLLEAIAKLQELNIKLVELLTKLTDPATIREAIRKVKEDSERIVAEAERLIAAAKAESERIIREAERLIAAAKAESERIIREGSGSGDPDVARLQELNIELARELLRDVARLQELNIELARELLRAAAELQELNIKLVELASELTGSRTLVTFKDVFVDFTREEWKLLDTAQQIVYRNVMLENYKNLVSLGYGSSKRIVEDAERLIREAAAASEKISREAERLIREAAAASEKISRE

SEQ ID NO: 27122 - protein, 398 aa, Artificial Sequence
  Synthetic
MSKEAVTKLQALNIKLAEKLLEAVTKLQALNIKLAEKLLEALARLQELNIALVYLAVELTDPKRIADEIKKVKDKSKEIVERAEEEIARAAAESKKILDEAEEEIARAAAESKKILDEGSGSGSDAVAELQALNLKLAELLLEAVAELQALNLKLAELLLEAIAKLQELNIKLVELLTKLTDPATIREAIRKVKEDSERIVAEAERLIAAAKAESERIIREAERLIAAAKAESERIIREGSGSGDPDVARLQELNIELARELLRDVARLQELNIELARELLRAAAELQELNIKLVELASELTGSRTLVTFKDVFVDFTREEWKLLDTAQQIVYRNVMLENYKNLVSLGYGSDEARKAIARVKRESKRIVEDAERLIREAAAASEKISREAERLIREAA

SEQ ID NO: 27123 - protein, 369 aa, Artificial Sequence
  Synthetic
MSKEAVTKLQALNIKLAEKLLEAVTKLQALNIKLAEKLLEALARLQELNIALVYLAVELTDPKRIADEIKKVKDKSKEIVERAEEEIARAAAESKKILDEAEEEIARAAAESKKILDEGSGSGSDAVAELQALNLKLAELLLEAVAELQALNLKLAELLLEAIAKLQELNIKLVELLTKLTDPATIREAIRKVKEDSERIVAEAERLIAAAKAESERIIREAERLIAAAKAESERIIREGSGSGDPDVARLQELNIELARELLRDVARLQELNIELARELLRAAAELQELNIKLVELASELTDEARKAIARVKRESKRIVEDAERTLVTFKDVFVDFTREEWKLLDTAQQIVYRNVMLENYKNLVSLGY

SEQ ID NO: 27124 - protein, 372 aa, Artificial Sequence
  Synthetic
MSKEAVTKLQALNIKLAEKLLEAVTKLQALNIKLAEKLLEALARLQELNIALVYLAVELTDPKRIADEIKKVKDKSKEIVERAEEEIARAAAESKKILDEAEEEIARAAAESKKILDEGSGSGSDAVAELQALNLKLAELLLEAVAELQALNLKLAELLLEAIAKLQELNIKLVELLTKLTDPATIREAIRKVKEDSERIVAEAERLIAAAKAESERIIREAERLIAAAKAESERIIREGSGSGDPDVARLQELNIELARELLRDVARLQELNIELARELLRAAAELQELNIKLVELASELTDEARKAIARVKRESKRIVEDAERLIRTLVTFKDVFVDFTREEWKLLDTAQQIVYRNVMLENYKNLVSLGY

SEQ ID NO: 27125 - protein, 383 aa, Artificial Sequence
  Synthetic
MSKEAVTKLQALNIKLAEKLLEAVTKLQALNIKLAEKLLEALARLQELNIALVYLAVELTDPKRIADEIKKVKDKSKEIVERAEEEIARAAAESKKILDEAEEEIARAAAESKKILDEGSGSGSDAVAELQALNLKLAELLLEAVAELQALNLKLAELLLEAIAKLQELNIKLVELLTKLTDPATIREAIRKVKEDSERIVAEAERLIAAAKAESERIIREAERLIAAAKAESERIIREGSGSGDPDVARLQELNIELARELLRDVARLQELNIELARELLRAAAELQELNIKLVELASELTDEARKAIARVKRESKRIVEDAERLIREAAAASEKISRTLVTFKDVFVDFTREEWKLLDTAQQIVYRNVMLENYKNLVSLGY

SEQ ID NO: 27126 - protein, 184 aa, Artificial Sequence; identical to SEQ ID NO: 6844
  Synthetic

SEQ ID NO: 27127 - protein, 59 aa, Artificial Sequence; identical to SEQ ID NO: 19128
  Synthetic

SEQ ID NO: 27128 - protein, 180 aa, Artificial Sequence; identical to SEQ ID NO: 12828
  Synthetic

SEQ ID NO: 27129 - protein, 59 aa, Artificial Sequence; identical to SEQ ID NO: 14436
  Synthetic

SEQ ID NO: 27130 - protein, 174 aa, Artificial Sequence; identical to SEQ ID NO: 12840
  Synthetic

SEQ ID NO: 27131 - protein, 56 aa, Artificial Sequence; identical to SEQ ID NO: 15502
  Synthetic

SEQ ID NO: 27132 - protein, 178 aa, Artificial Sequence; identical to SEQ ID NO: 12844
  Synthetic

SEQ ID NO: 27133 - protein, 55 aa, Artificial Sequence; identical to SEQ ID NO: 25128
  Synthetic

SEQ ID NO: 27134 - protein, 185 aa, Artificial Sequence; identical to SEQ ID NO: 12850
  Synthetic

SEQ ID NO: 27135 - protein, 59 aa, Artificial Sequence; identical to SEQ ID NO: 25134
  Synthetic

SEQ ID NO: 27136 - protein, 172 aa, Artificial Sequence; identical to SEQ ID NO: 12852
  Synthetic

SEQ ID NO: 27137 - protein, 56 aa, Artificial Sequence; identical to SEQ ID NO: 16914
  Synthetic

SEQ ID NO: 27138 - protein, 180 aa, Artificial Sequence; identical to SEQ ID NO: 12858
  Synthetic

SEQ ID NO: 27139 - protein, 56 aa, Artificial Sequence; identical to SEQ ID NO: 18130
  Synthetic

SEQ ID NO: 27140 - protein, 188 aa, Artificial Sequence; identical to SEQ ID NO: 554
  Synthetic

SEQ ID NO: 27141 - protein, 62 aa, Artificial Sequence; identical to SEQ ID NO: 25144
  Synthetic

SEQ ID NO: 27142 - protein, 188 aa, Artificial Sequence; identical to SEQ ID NO: 563
  Synthetic

SEQ ID NO: 27143 - protein, 62 aa, Artificial Sequence; identical to SEQ ID NO: 25144
  Synthetic

SEQ ID NO: 27144 - protein, 188 aa, Artificial Sequence; identical to SEQ ID NO: 595
  Synthetic

SEQ ID NO: 27145 - protein, 62 aa, Artificial Sequence; identical to SEQ ID NO: 25144
  Synthetic

SEQ ID NO: 27146 - protein, 176 aa, Artificial Sequence; identical to SEQ ID NO: 12874
  Synthetic

SEQ ID NO: 27147 - protein, 59 aa, Artificial Sequence; identical to SEQ ID NO: 25158
  Synthetic

SEQ ID NO: 27148 - protein, 184 aa, Artificial Sequence; identical to SEQ ID NO: 12894
  Synthetic

SEQ ID NO: 27149 - protein, 59 aa, Artificial Sequence; identical to SEQ ID NO: 25178
  Synthetic

SEQ ID NO: 27150 - protein, 176 aa, Artificial Sequence; identical to SEQ ID NO: 12902
  Synthetic

SEQ ID NO: 27151 - protein, 59 aa, Artificial Sequence; identical to SEQ ID NO: 25186
  Synthetic

SEQ ID NO: 27152 - protein, 182 aa, Artificial Sequence; identical to SEQ ID NO: 12906
  Synthetic

SEQ ID NO: 27153 - protein, 56 aa, Artificial Sequence; identical to SEQ ID NO: 25190
  Synthetic

SEQ ID NO: 27154 - protein, 186 aa, Artificial Sequence; identical to SEQ ID NO: 12908
  Synthetic

SEQ ID NO: 27155 - protein, 59 aa, Artificial Sequence; identical to SEQ ID NO: 25192
  Synthetic

SEQ ID NO: 27156 - protein, 175 aa, Artificial Sequence; identical to SEQ ID NO: 12924
  Synthetic

SEQ ID NO: 27157 - protein, 55 aa, Artificial Sequence; identical to SEQ ID NO: 25208
  Synthetic

SEQ ID NO: 27158 - protein, 180 aa, Artificial Sequence; identical to SEQ ID NO: 12962
  Synthetic

SEQ ID NO: 27159 - protein, 59 aa, Artificial Sequence; identical to SEQ ID NO: 25246
  Synthetic

SEQ ID NO: 27160 - protein, 177 aa, Artificial Sequence; identical to SEQ ID NO: 12970
  Synthetic

SEQ ID NO: 27161 - protein, 59 aa, Artificial Sequence; identical to SEQ ID NO: 24672
  Synthetic

SEQ ID NO: 27162 - protein, 184 aa, Artificial Sequence; identical to SEQ ID NO: 6844
  Synthetic

SEQ ID NO: 27163 - protein, 59 aa, Artificial Sequence; identical to SEQ ID NO: 19127
  Synthetic

SEQ ID NO: 27164 - protein, 178 aa, Artificial Sequence; identical to SEQ ID NO: 12844
  Synthetic

SEQ ID NO: 27165 - protein, 60 aa, Artificial Sequence; identical to SEQ ID NO: 25127
  Synthetic

SEQ ID NO: 27166 - protein, 185 aa, Artificial Sequence; identical to SEQ ID NO: 12850
  Synthetic

SEQ ID NO: 27167 - protein, 60 aa, Artificial Sequence; identical to SEQ ID NO: 25133
  Synthetic

SEQ ID NO: 27168 - protein, 172 aa, Artificial Sequence; identical to SEQ ID NO: 12852
  Synthetic

SEQ ID NO: 27169 - protein, 57 aa, Artificial Sequence; identical to SEQ ID NO: 25135
  Synthetic

SEQ ID NO: 27170 - protein, 180 aa, Artificial Sequence; identical to SEQ ID NO: 12858
  Synthetic

SEQ ID NO: 27171 - protein, 60 aa, Artificial Sequence; identical to SEQ ID NO: 25141
  Synthetic

SEQ ID NO: 27172 - protein, 188 aa, Artificial Sequence; identical to SEQ ID NO: 1740
  Synthetic

SEQ ID NO: 27173 - protein, 60 aa, Artificial Sequence; identical to SEQ ID NO: 19323
  Synthetic

SEQ ID NO: 27174 - protein, 188 aa, Artificial Sequence; identical to SEQ ID NO: 1911
  Synthetic

SEQ ID NO: 27175 - protein, 60 aa, Artificial Sequence; identical to SEQ ID NO: 19323
  Synthetic

SEQ ID NO: 27176 - protein, 186 aa, Artificial Sequence; identical to SEQ ID NO: 12908
  Synthetic

SEQ ID NO: 27177 - protein, 61 aa, Artificial Sequence; identical to SEQ ID NO: 25191
  Synthetic

SEQ ID NO: 27178 - protein, 247 aa, Artificial Sequence; identical to SEQ ID NO: 1129
  Synthetic

SEQ ID NO: 27179 - protein, 59 aa, Artificial Sequence; identical to SEQ ID NO: 25434
  Synthetic

SEQ ID NO: 27180 - protein, 235 aa, Artificial Sequence; identical to SEQ ID NO: 13508
  Synthetic

SEQ ID NO: 27181 - protein, 56 aa, Artificial Sequence; identical to SEQ ID NO: 25792
  Synthetic

SEQ ID NO: 27182 - protein, 238 aa, Artificial Sequence; identical to SEQ ID NO: 13970
  Synthetic

SEQ ID NO: 27183 - protein, 56 aa, Artificial Sequence; identical to SEQ ID NO: 25342
  Synthetic

SEQ ID NO: 27184 - protein, 239 aa, Artificial Sequence; identical to SEQ ID NO: 13982
  Synthetic

SEQ ID NO: 27185 - protein, 59 aa, Artificial Sequence; identical to SEQ ID NO: 26266
  Synthetic

SEQ ID NO: 27186 - protein, 244 aa, Artificial Sequence; identical to SEQ ID NO: 793
  Synthetic

SEQ ID NO: 27187 - protein, 60 aa, Artificial Sequence; identical to SEQ ID NO: 26278
  Synthetic

SEQ ID NO: 27188 - protein, 250 aa, Artificial Sequence; identical to SEQ ID NO: 1038
  Synthetic

SEQ ID NO: 27189 - protein, 59 aa, Artificial Sequence; identical to SEQ ID NO: 25380
  Synthetic

SEQ ID NO: 27190 - protein, 247 aa, Artificial Sequence; identical to SEQ ID NO: 14002
  Synthetic

SEQ ID NO: 27191 - protein, 59 aa, Artificial Sequence; identical to SEQ ID NO: 26286
  Synthetic

SEQ ID NO: 27192 - protein, 247 aa, Artificial Sequence; identical to SEQ ID NO: 896
  Synthetic

SEQ ID NO: 27193 - protein, 59 aa, Artificial Sequence; identical to SEQ ID NO: 25434
  Synthetic

SEQ ID NO: 27194 - protein, 247 aa, Artificial Sequence; identical to SEQ ID NO: 1006
  Synthetic

SEQ ID NO: 27195 - protein, 59 aa, Artificial Sequence; identical to SEQ ID NO: 25434
  Synthetic

SEQ ID NO: 27196 - protein, 247 aa, Artificial Sequence; identical to SEQ ID NO: 1114
  Synthetic

SEQ ID NO: 27197 - protein, 59 aa, Artificial Sequence; identical to SEQ ID NO: 25434
  Synthetic

SEQ ID NO: 27198 - protein, 247 aa, Artificial Sequence; identical to SEQ ID NO: 940
  Synthetic

SEQ ID NO: 27199 - protein, 59 aa, Artificial Sequence; identical to SEQ ID NO: 25434
  Synthetic

SEQ ID NO: 27200 - protein, 247 aa, Artificial Sequence; identical to SEQ ID NO: 974
  Synthetic

SEQ ID NO: 27201 - protein, 59 aa, Artificial Sequence; identical to SEQ ID NO: 25434
  Synthetic

SEQ ID NO: 27202 - protein, 247 aa, Artificial Sequence; identical to SEQ ID NO: 1042
  Synthetic

SEQ ID NO: 27203 - protein, 59 aa, Artificial Sequence; identical to SEQ ID NO: 25434
  Synthetic

SEQ ID NO: 27204 - protein, 240 aa, Artificial Sequence; identical to SEQ ID NO: 14042
  Synthetic

SEQ ID NO: 27205 - protein, 60 aa, Artificial Sequence; identical to SEQ ID NO: 25440
  Synthetic

SEQ ID NO: 27206 - protein, 248 aa, Artificial Sequence; identical to SEQ ID NO: 1045
  Synthetic

SEQ ID NO: 27207 - protein, 59 aa, Artificial Sequence; identical to SEQ ID NO: 26334
  Synthetic

SEQ ID NO: 27208 - protein, 248 aa, Artificial Sequence; identical to SEQ ID NO: 1097
  Synthetic

SEQ ID NO: 27209 - protein, 59 aa, Artificial Sequence; identical to SEQ ID NO: 26334
  Synthetic

SEQ ID NO: 27210 - protein, 248 aa, Artificial Sequence; identical to SEQ ID NO: 1160
  Synthetic

SEQ ID NO: 27211 - protein, 59 aa, Artificial Sequence; identical to SEQ ID NO: 26334
  Synthetic

SEQ ID NO: 27212 - protein, 242 aa, Artificial Sequence; identical to SEQ ID NO: 14058
  Synthetic

SEQ ID NO: 27213 - protein, 56 aa, Artificial Sequence; identical to SEQ ID NO: 26342
  Synthetic

SEQ ID NO: 27214 - protein, 231 aa, Artificial Sequence; identical to SEQ ID NO: 14078
  Synthetic

SEQ ID NO: 27215 - protein, 55 aa, Artificial Sequence; identical to SEQ ID NO: 25524
  Synthetic

SEQ ID NO: 27216 - protein, 239 aa, Artificial Sequence; identical to SEQ ID NO: 14094
  Synthetic

SEQ ID NO: 27217 - protein, 59 aa, Artificial Sequence; identical to SEQ ID NO: 26378
  Synthetic

SEQ ID NO: 27218 - protein, 241 aa, Artificial Sequence; identical to SEQ ID NO: 14102
  Synthetic

SEQ ID NO: 27219 - protein, 56 aa, Artificial Sequence; identical to SEQ ID NO: 26386
  Synthetic

SEQ ID NO: 27220 - protein, 246 aa, Artificial Sequence; identical to SEQ ID NO: 980
  Synthetic

SEQ ID NO: 27221 - protein, 55 aa, Artificial Sequence; identical to SEQ ID NO: 26402
  Synthetic

SEQ ID NO: 27222 - protein, 246 aa, Artificial Sequence; identical to SEQ ID NO: 1075
  Synthetic

SEQ ID NO: 27223 - protein, 55 aa, Artificial Sequence; identical to SEQ ID NO: 26402
  Synthetic

SEQ ID NO: 27224 - protein, 245 aa, Artificial Sequence; identical to SEQ ID NO: 14126
  Synthetic

SEQ ID NO: 27225 - protein, 59 aa, Artificial Sequence; identical to SEQ ID NO: 26410
  Synthetic

SEQ ID NO: 27226 - protein, 235 aa, Artificial Sequence; identical to SEQ ID NO: 14142
  Synthetic

SEQ ID NO: 27227 - protein, 56 aa, Artificial Sequence; identical to SEQ ID NO: 26426
  Synthetic

SEQ ID NO: 27228 - protein, 233 aa, Artificial Sequence; identical to SEQ ID NO: 14150
  Synthetic

SEQ ID NO: 27229 - protein, 59 aa, Artificial Sequence; identical to SEQ ID NO: 26434
  Synthetic

SEQ ID NO: 27230 - protein, 238 aa, Artificial Sequence; identical to SEQ ID NO: 14154
  Synthetic

SEQ ID NO: 27231 - protein, 56 aa, Artificial Sequence; identical to SEQ ID NO: 25780
  Synthetic

SEQ ID NO: 27232 - protein, 237 aa, Artificial Sequence; identical to SEQ ID NO: 14190
  Synthetic

SEQ ID NO: 27233 - protein, 59 aa, Artificial Sequence; identical to SEQ ID NO: 25896
  Synthetic

SEQ ID NO: 27234 - protein, 246 aa, Artificial Sequence; identical to SEQ ID NO: 14194
  Synthetic

SEQ ID NO: 27235 - protein, 60 aa, Artificial Sequence; identical to SEQ ID NO: 25898
  Synthetic

SEQ ID NO: 27236 - protein, 252 aa, Artificial Sequence; identical to SEQ ID NO: 14202
  Synthetic

SEQ ID NO: 27237 - protein, 60 aa, Artificial Sequence; identical to SEQ ID NO: 25950
  Synthetic

SEQ ID NO: 27238 - protein, 252 aa, Artificial Sequence; identical to SEQ ID NO: 1121
  Synthetic

SEQ ID NO: 27239 - protein, 60 aa, Artificial Sequence; identical to SEQ ID NO: 25950
  Synthetic

SEQ ID NO: 27240 - protein, 232 aa, Artificial Sequence; identical to SEQ ID NO: 14246
  Synthetic

SEQ ID NO: 27241 - protein, 56 aa, Artificial Sequence; identical to SEQ ID NO: 26068
  Synthetic

SEQ ID NO: 27242 - protein, 240 aa, Artificial Sequence; identical to SEQ ID NO: 14262
  Synthetic

SEQ ID NO: 27243 - protein, 56 aa, Artificial Sequence; identical to SEQ ID NO: 26546
  Synthetic

SEQ ID NO: 27244 - protein, 249 aa, Artificial Sequence; identical to SEQ ID NO: 992
  Synthetic

SEQ ID NO: 27245 - protein, 59 aa, Artificial Sequence; identical to SEQ ID NO: 26558
  Synthetic

SEQ ID NO: 27246 - protein, 249 aa, Artificial Sequence; identical to SEQ ID NO: 1107
  Synthetic

SEQ ID NO: 27247 - protein, 59 aa, Artificial Sequence; identical to SEQ ID NO: 26558
  Synthetic

SEQ ID NO: 27248 - protein, 249 aa, Artificial Sequence; identical to SEQ ID NO: 1122
  Synthetic

SEQ ID NO: 27249 - protein, 59 aa, Artificial Sequence; identical to SEQ ID NO: 26558
  Synthetic

SEQ ID NO: 27250 - protein, 249 aa, Artificial Sequence; identical to SEQ ID NO: 1026
  Synthetic

SEQ ID NO: 27251 - protein, 59 aa, Artificial Sequence; identical to SEQ ID NO: 26558
  Synthetic

SEQ ID NO: 27252 - protein, 249 aa, Artificial Sequence; identical to SEQ ID NO: 1168
  Synthetic

SEQ ID NO: 27253 - protein, 59 aa, Artificial Sequence; identical to SEQ ID NO: 26558
  Synthetic

SEQ ID NO: 27254 - protein, 249 aa, Artificial Sequence; identical to SEQ ID NO: 14274
  Synthetic

SEQ ID NO: 27255 - protein, 59 aa, Artificial Sequence; identical to SEQ ID NO: 26558
  Synthetic

SEQ ID NO: 27256 - protein, 243 aa, Artificial Sequence; identical to SEQ ID NO: 14286
  Synthetic

SEQ ID NO: 27257 - protein, 60 aa, Artificial Sequence; identical to SEQ ID NO: 26570
  Synthetic

SEQ ID NO: 27258 - protein, 243 aa, Artificial Sequence; identical to SEQ ID NO: 14298
  Synthetic

SEQ ID NO: 27259 - protein, 56 aa, Artificial Sequence; identical to SEQ ID NO: 26582
  Synthetic

SEQ ID NO: 27260 - protein, 232 aa, Artificial Sequence; identical to SEQ ID NO: 14302
  Synthetic

SEQ ID NO: 27261 - protein, 56 aa, Artificial Sequence; identical to SEQ ID NO: 26586
  Synthetic

SEQ ID NO: 27262 - protein, 235 aa, Artificial Sequence; identical to SEQ ID NO: 13508
  Synthetic

SEQ ID NO: 27263 - protein, 56 aa, Artificial Sequence; identical to SEQ ID NO: 25791
  Synthetic

SEQ ID NO: 27264 - protein, 239 aa, Artificial Sequence; identical to SEQ ID NO: 13982
  Synthetic

SEQ ID NO: 27265 - protein, 56 aa, Artificial Sequence; identical to SEQ ID NO: 26265
  Synthetic

SEQ ID NO: 27266 - protein, 247 aa, Artificial Sequence; identical to SEQ ID NO: 14002
  Synthetic

SEQ ID NO: 27267 - protein, 60 aa, Artificial Sequence; identical to SEQ ID NO: 26285
  Synthetic

SEQ ID NO: 27268 - protein, 247 aa, Artificial Sequence; identical to SEQ ID NO: 1366
  Synthetic

SEQ ID NO: 27269 - protein, 56 aa, Artificial Sequence; identical to SEQ ID NO: 26321
  Synthetic

SEQ ID NO: 27270 - protein, 246 aa, Artificial Sequence; identical to SEQ ID NO: 1930
  Synthetic

SEQ ID NO: 27271 - protein, 60 aa, Artificial Sequence; identical to SEQ ID NO: 26401
  Synthetic

SEQ ID NO: 27272 - protein, 235 aa, Artificial Sequence; identical to SEQ ID NO: 14142
  Synthetic

SEQ ID NO: 27273 - protein, 56 aa, Artificial Sequence; identical to SEQ ID NO: 26425
  Synthetic

SEQ ID NO: 27274 - protein, 252 aa, Artificial Sequence; identical to SEQ ID NO: 1481
  Synthetic

SEQ ID NO: 27275 - protein, 59 aa, Artificial Sequence; identical to SEQ ID NO: 26485
  Synthetic

SEQ ID NO: 27276 - protein, 249 aa, Artificial Sequence; identical to SEQ ID NO: 1624
  Synthetic

SEQ ID NO: 27277 - protein, 59 aa, Artificial Sequence; identical to SEQ ID NO: 26557
  Synthetic

SEQ ID NO: 27278 - protein, 235 aa, Artificial Sequence
  Synthetic
DEAKELLDEIRKAVKESEDRLEKLLRDYEKELRRDHMVLHEYVNAAGITLEELRRGSLDAKELLKTLEDLLREVLEVARRVVETLKELNRRVLEVVREDIEANERLLRRVLDTLRRGGVDERRIKDLERLIRESLKKAEEVLREAAEKSREIVDEIREVLKRADEALKRIIKKIRETRGADALSRLLEELLRVVDDLIRVLKELIDKSRKVIEELLELLKRINEENLKVLAEIIK

SEQ ID NO: 27279 - protein, 235 aa, Artificial Sequence
  Synthetic
DEAKELLDEIRKAVKESEDRLEKLLRDYEKELRRLEKELRDLKRRIEEKLEELRRGSLDAKELLKTLEDLLREVLEVARRVVETLKELNRRVLEVVREDIERNERLLRRVLDTLRRGGVDERRIKDLERLIRESLKKAEEVLREAAEKSREIVDEIREVLKRADEALKRIIKKIRETRGADADHMVLHEYVNAAGITIRVLKELIDKSRKVIEELLELLKRINEENLKVLAEIIK

SEQ ID NO: 27280 - protein, 235 aa, Artificial Sequence
  Synthetic
DEAKELLDEIRKAVKESEDRLEKLLRDYEKELRRLEKELRDLKRRIEEKLEELRRGSLDAKELLKTLEDLLREVLEVARRVVETLKELNRRVLEVVREDIERNERLLRRVLDTLRRGGVDERRIKDLERLIRESLKKAEEVLREAAEKSREIVDEIREVLKRADEALKRIIKKIRETRGADARDHMVLHEYVNAAGITRVLKELIDKSRKVIEELLELLKRINEENLKVLAEIIK

SEQ ID NO: 27281 - protein, 235 aa, Artificial Sequence
  Synthetic
DEAKELLDEIRKAVKESEDRLEKLLRDYEKELRRLEKELRDLKRRIEEKLEELRRGSLDAKELLKTLEDLLREVLEVARRVVETLKELNRRVLEVVREDIERNERLLRRVLDTLRRGGVDERRIKDLERLIRESLKKAEEVLREAAEKSREIVDEIREVLKRADEALKRIIKKIRETRGADALSRDHMVLHEYVNAAGITLKELIDKSRKVIEELLELLKRINEENLKVLAEIIK

SEQ ID NO: 27282 - protein, 235 aa, Artificial Sequence
  Synthetic
DEAKELLDEIRKAVKESEDRLEKLLRDYEKELRRLEKELRDLKRRIEEKLEELRRGSLDAKELLKTLEDLLREVLEVARRVVETLKELNRRVLEVVREDIERNERLLRRVLDTLRRGGVDERRIKDLERLIRESLKKAEEVLREAAEKSREIVDEIREVLKRADEALKRIIKKIRDHMVLHEYVNAAGITLRVVDDLIRVLKELIDKSRKVIEELLELLKRINEENLKVLAEIIK

SEQ ID NO: 27283 - protein, 242 aa, Artificial Sequence
  Synthetic
SEKEKLLKESEEEVRRLRRTLEELLRKYREVLERLRDHMVLHEYVNAAGITRLKEVLDRSGLDIDTIIKEVEDLLKTVLDRLRELLDKIARLTKEAIEVVREIIERIVRHAERVKDELRKGGADKRKLDRVDRLIKENTRHLKEILDRIEDLVRRSEKKLRDIIREVRRLIEELRKKAEEIKKDPDERLVKTLIEDVERVIKRILELITRVAEDNERVLERIIRELTDNLERHLKIVREIVK

SEQ ID NO: 27284 - protein, 235 aa, Artificial Sequence
  Synthetic
SEKEDLARKLRKLVEELTREYEELVKKLERLIEEIERDHMVLHEYVNAAGITISEEVRKLGTDERVLKRLLERLRRIIEEDHELNTELLKRLLDLLKEILDTSRELLKRLLDILRKGVRDEEVLRDLERTLREVLEENERAIEEAERVLRKVLEDSERAVRDARRVLAEVDKSPTGDEALRKLVELLVEVLRRLIRVNRELVKLLREVLERLLRILRESVKKLKRLIEKVIKDAT

SEQ ID NO: 27285 - protein, 235 aa, Artificial Sequence
  Synthetic
SEKEDLARKLRKLVEELTREYEELVKKLERLIEEIEKVSEESVRKLEKLLREISEEVRKLGTDERVLKRLLERLRRIIEEDHELNTELLKRLLDLLKEILDTSRELLKRLLDILRKGVRDEEVLRDLERTLREVLEENERAIEEAERVLRKVLEDSERAVRDARRVLAEVDKSPTGDEARDHMVLHEYVNAAGITRVNRELVKLLREVLERLLRILRESVKKLKRLIEKVIKDAT

SEQ ID NO: 27286 - protein, 235 aa, Artificial Sequence
  Synthetic
SEKEDLARKLRKLVEELTREYEELVKKLERLIEEIEKVSEESVRKLEKLLREISEEVRKLGTDERVLKRLLERLRRIIEEDHELNTELLKRLLDLLKEILDTSRELLKRLLDILRKGVRDEEVLRDLERTLREVLEENERAIEEAERVLRKVLEDSERAVRDARRVLAEVDKSPTGDERDHMVLHEYVNAAGITIRVNRELVKLLREVLERLLRILRESVKKLKRLIEKVIKDAT

SEQ ID NO: 27287 - protein, 235 aa, Artificial Sequence
  Synthetic
SEKEDLARKLRKLVEELTREYEELVKKLERLIEEIEKVSEESVRKLEKLLREISEEVRKLGTDERVLKRLLERLRRIIEEDHELNTELLKRLLDLLKEILDTSRELLKRLLDILRKGVRDEEVLRDLERTLREVLEENERAIEEAERVLRKVLEDSERAVRDARRVLAEVDKSPTGRDHMVLHEYVNAAGITRLIRVNRELVKLLREVLERLLRILRESVKKLKRLIEKVIKDAT

SEQ ID NO: 27288 - protein, 235 aa, Artificial Sequence
  Synthetic
SEKEDLARKLRKLVEELTREYEELVKKLERLIEEIRDHMVLHEYVNAAGITEISEEVRKLGTDERVLKRLLERLRRIIEEDHELNTELLKRLLDLLKEILDTSRELLKRLLDILRKGVRDEEVLRDLERTLREVLEENERAIEEAERVLRKVLEDSERAVRDARRVLAEVDKSPTGDEALRKLVELLVEVLRRLIRVNRELVKLLREVLERLLRILRESVKKLKRLIEKVIKDAT

SEQ ID NO: 27289 - protein, 235 aa, Artificial Sequence
  Synthetic
SEKEDLARKLRKLVEELTREYEELVKKLERLIEEIEKVSEESVRKLEKLLREISEEVRKLGTDERVLKRLLERLRRIIEEDHELNTELLKRLLDLLKEILDTSRELLKRLLDILRKGVRDEEVLRDLERTLREVLEENERAIEEAERVLRKVLEDSERAVRDARRVLAEVDKSPTRDHMVLHEYVNAAGITRRLIRVNRELVKLLREVLERLLRILRESVKKLKRLIEKVIKDAT

SEQ ID NO: 27290 - protein, 235 aa, Artificial Sequence
  Synthetic
SEKEDLARKLRKLVEELTREYEELVKKLERLIERDHMVLHEYVNAAGITLREISEEVRKLGTDERVLKRLLERLRRIIEEDHELNTELLKRLLDLLKEILDTSRELLKRLLDILRKGVRDEEVLRDLERTLREVLEENERAIEEAERVLRKVLEDSERAVRDARRVLAEVDKSPTGDEALRKLVELLVEVLRRLIRVNRELVKLLREVLERLLRILRESVKKLKRLIEKVIKDAT

SEQ ID NO: 27291 - protein, 235 aa, Artificial Sequence
  Synthetic
SEKEDLARKLRKLVEELTREYEELVKKLERLIEEIEKRDHMVLHEYVNAAGITSEEVRKLGTDERVLKRLLERLRRIIEEDHELNTELLKRLLDLLKEILDTSRELLKRLLDILRKGVRDEEVLRDLERTLREVLEENERAIEEAERVLRKVLEDSERAVRDARRVLAEVDKSPTGDEALRKLVELLVEVLRRLIRVNRELVKLLREVLERLLRILRESVKKLKRLIEKVIKDAT

SEQ ID NO: 27292 - protein, 235 aa, Artificial Sequence
  Synthetic
SEKEDLARKLRKLVEELTREYEELVKKLERLIEEIEKVSEESRDHMVLHEYVNAAGITKLGTDERVLKRLLERLRRIIEEDHELNTELLKRLLDLLKEILDTSRELLKRLLDILRKGVRDEEVLRDLERTLREVLEENERAIEEAERVLRKVLEDSERAVRDARRVLAEVDKSPTGDEALRKLVELLVEVLRRLIRVNRELVKLLREVLERLLRILRESVKKLKRLIEKVIKDAT

SEQ ID NO: 27293 - protein, 235 aa, Artificial Sequence
  Synthetic
SEKEDLARKLRKLVEELTREYEELVKKLERLIEEIEKVSEESVRDHMVLHEYVNAAGITLGTDERVLKRLLERLRRIIEEDHELNTELLKRLLDLLKEILDTSRELLKRLLDILRKGVRDEEVLRDLERTLREVLEENERAIEEAERVLRKVLEDSERAVRDARRVLAEVDKSPTGDEALRKLVELLVEVLRRLIRVNRELVKLLREVLERLLRILRESVKKLKRLIEKVIKDAT

SEQ ID NO: 27294 - protein, 242 aa, Artificial Sequence
  Synthetic
SEEEDLLERVKRVLDELIEIVDRNHELNRRVVETSAALVERLLEEVERALETLEREIPGSSLLDKAIKDLRDVLRRVKEKVKRSIEELKEVLEESRRVLEEVVRKLREVIDRVRRLVEKGVDLRDLIRELKRVLEEAVKLIERLVRLNTRAAEKDNESLRELVRAIKEALKRAVDAVRKGGLDSRAVKKLDRDHMVLHEYVNAAGITNEELWRALVELNKESVRRLREIVERVARDLEETAR

SEQ ID NO: 27295 - protein, 242 aa, Artificial Sequence
  Synthetic
SEEEDLLERVKRVLDELIEIVDRNHELNRRVVETSAALVERLLEEVERALETLEREIPGSSLLDKAIKDLRDVLRRVKEKVKRSIEELKEVLEESRRVLEEVVRKLREVIDRVRRLVEKGVDLRDLIRELKRVLEEAVKLIERLVRLNTRAAEKDNESLRELVRAIKEALKRAVDAVRKGGLDSRARDHMVLHEYVNAAGITDVVRRNEELWRALVELNKESVRRLREIVERVARDLEETAR

SEQ ID NO: 27296 - protein, 242 aa, Artificial Sequence
  Synthetic
SEEEDLLERVKRVLDELIEIVDRNHELNRRVVETSAALVERLLEEVERALETLEREIPGSSLLDKAIKDLRDVLRRVKEKVKRSIEELKEVLEESRRVLEEVVRKLREVIDRVRRLVEKGVDLRDLIRELKRVLEEAVKLIERLVRLNTRAAEKDNESLRELVRAIKEALKRAVDAVRKGGLDSRRDHMVLHEYVNAAGITEDVVRRNEELWRALVELNKESVRRLREIVERVARDLEETAR

SEQ ID NO: 27297 - protein, 242 aa, Artificial Sequence
  Synthetic
SEEEDLLERVKRVLDELIEIVDRNHELNRRVVETSAALVERLLEEVERALETLEREIPGSSLLDKAIKDLRDVLRRVKEKVKRSIEELKEVLEESRRVLEEVVRKLREVIDRVRRLVEKGVDLRDLIRELKRVLEEAVKLIERLVRLNTRAAEKDNESLRELVRAIKEALKRAVDAVRKGGLRDHMVLHEYVNAAGITKKLEDVVRRNEELWRALVELNKESVRRLREIVERVARDLEETAR

SEQ ID NO: 27298 - protein, 232 aa, Artificial Sequence
  Synthetic
DETEEVIKKIAKLIDELIETLKKIVEDSAKLIKELIDLLEEIIKRSADLIRELEKVSKRGDRDRLKKLIDRMRRETERALEELRRVIEELKEATERALKTIEDLIREIEEAIRRELGDEDLAREILEVIRRILELLREDMELNLRALEEILRLLEEVIKLNKDAIDEILELLKRDHMVLHEYVNAAGITESKKLVRDVVEEAKRLLKENRDSTRKIIEDIRRLLRKIEDSTR

SEQ ID NO: 27299 - protein, 232 aa, Artificial Sequence
  Synthetic
DETEEVIKKIAKLIDELIETLKKIVEDSAKLIKELIDLLEEIIKRSADLIRELEKVSKRGDRDRLKKLIDRMRRETERALEELRRVIEELKEATERALKTIEDLIREIEEAIRRELGDEDLAREILEVIRRILELLREDMELNLRALEEILRLLEEVIKLNKDAIDEILELLKGRDHMVLHEYVNAAGITSKKLVRDVVEEAKRLLKENRDSTRKIIEDIRRLLRKIEDSTR

SEQ ID NO: 27300 - protein, 234 aa, Artificial Sequence
  Synthetic
SKEETLRKEAEDLLRRLEELTRRLEKKARELLERAKKLSRDLARDHMVLHEYVNAAGITEELIKVLEEVAKTSIDLNKEVIDVIRRVIEESLELNKRVLDVLRRVLDIAARKGRDKKAIRDVVREAARVIKEVIDEDEKVNRDLKRVIERVIDDDRKALERLRKAVEEVASRGDDEAAKRLVEELLKAVTDLSRKNKRILEELLKAIETLSDENKKILTEILDALRRLVEKIEK

SEQ ID NO: 27301 - protein, 234 aa, Artificial Sequence
  Synthetic
SKEETLRKEAEDLLRRLEELTRRLEKKARELLERAKKLSRRDHMVLHEYVNAAGITGVPEELIKVLEEVAKTSIDLNKEVIDVIRRVIEESLELNKRVLDVLRRVLDIAARKGRDKKAIRDVVREAARVIKEVIDEDEKVNRDLKRVIERVIDDDRKALERLRKAVEEVASRGDDEAAKRLVEELLKAVTDLSRKNKRILEELLKAIETLSDENKKILTEILDALRRLVEKIEK

SEQ ID NO: 27302 - protein, 234 aa, Artificial Sequence
  Synthetic
SKEETLRKEAEDLLRRLEELTRRLEKKARELLERAKKLSRDLAEELKRLLKELREKGVPEELIKVLEEVAKTSIDLNKEVIDVIRRVIEESLELNKRVLDVLRRVLDIAARKGRDKKAIRDVVREAARVIKEVIDEDEKVNRDLKRVIERVIDDDRKALERLRKAVEEVASRGDDEARDHMVLHEYVNAAGITRKNKRILEELLKAIETLSDENKKILTEILDALRRLVEKIEK

SEQ ID NO: 27303 - protein, 234 aa, Artificial Sequence
  Synthetic
SKEETLRKEAEDLLRRLEELTRRLEKKARELLERARDHMVLHEYVNAAGITELREKGVPEELIKVLEEVAKTSIDLNKEVIDVIRRVIEESLELNKRVLDVLRRVLDIAARKGRDKKAIRDVVREAARVIKEVIDEDEKVNRDLKRVIERVIDDDRKALERLRKAVEEVASRGDDEAAKRLVEELLKAVTDLSRKNKRILEELLKAIETLSDENKKILTEILDALRRLVEKIEK

SEQ ID NO: 27304 - protein, 234 aa, Artificial Sequence
  Synthetic
SKEETLRKEAEDLLRRLEELTRRLEKKARELLERAKKLSRDHMVLHEYVNAAGITKGVPEELIKVLEEVAKTSIDLNKEVIDVIRRVIEESLELNKRVLDVLRRVLDIAARKGRDKKAIRDVVREAARVIKEVIDEDEKVNRDLKRVIERVIDDDRKALERLRKAVEEVASRGDDEAAKRLVEELLKAVTDLSRKNKRILEELLKAIETLSDENKKILTEILDALRRLVEKIEK

SEQ ID NO: 27305 - protein, 234 aa, Artificial Sequence
  Synthetic
SKEETLRKEAEDLLRRLEELTRRLEKKARELLERAKKLRDHMVLHEYVNAAGITEKGVPEELIKVLEEVAKTSIDLNKEVIDVIRRVIEESLELNKRVLDVLRRVLDIAARKGRDKKAIRDVVREAARVIKEVIDEDEKVNRDLKRVIERVIDDDRKALERLRKAVEEVASRGDDEAAKRLVEELLKAVTDLSRKNKRILEELLKAIETLSDENKKILTEILDALRRLVEKIEK

SEQ ID NO: 27306 - protein, 234 aa, Artificial Sequence
  Synthetic
SKEETLRKEAEDLLRRLEELTRRLEKKARELLERAKKLSRDLRDHMVLHEYVNAAGITPEELIKVLEEVAKTSIDLNKEVIDVIRRVIEESLELNKRVLDVLRRVLDIAARKGRDKKAIRDVVREAARVIKEVIDEDEKVNRDLKRVIERVIDDDRKALERLRKAVEEVASRGDDEAAKRLVEELLKAVTDLSRKNKRILEELLKAIETLSDENKKILTEILDALRRLVEKIEK

SEQ ID NO: 27307 - protein, 240 aa, Artificial Sequence
  Synthetic
SEREEVKEKLDRLLEEVEKTVRELKREHDELLKEVEKLVRDLKRDHMVLHEYVNAAGITKEILDVIREHVRTNKEILDRVLEVVEEHLRRNKEILDKLLDDIRKVVEDAKRILGIGDDETLRRAVRRILEELRKLVEDIRKKVKDSLETLERALEEAEERIRRSLEDLKRVLKEAKDKTKDKDRLDKVEELVKKLLEDTKRTVDRVRELVRKILKKSRETLEELERLIEKILRELEKDAR

SEQ ID NO: 27308 - protein, 240 aa, Artificial Sequence
  Synthetic
SEREEVKEKLDRLLEEVEKTVRELKREHDELLKEVEKLVRDLKKEHDELLKKVKDDGVPKEILDVIREHVRTNKEILDRVLEVVEEHLRRNKEILDKLLDDIRKVVEDAKRILGIGDDETLRRAVRRILEELRKLVEDIRKKVKDSLETLERALEEAEERIRRSLEDLKRVLKEAKDKTKDKDRDHMVLHEYVNAAGITKRTVDRVRELVRKILKKSRETLEELERLIEKILRELEKDAR

SEQ ID NO: 27309 - protein, 240 aa, Artificial Sequence
  Synthetic
SERETVKRRLEELLKEVKRTLDKLKEEHDRLLEDVRRVVEELRDHMVLHEYVNAAGITPEELLRVIAKVLETNKRILDDLLRVVKKHVDLNKEILDRILEMIKEIVERVKRVLGDGDEKTLRDKIRDIIRRLEDAAREAEERVRRSLEELKKAVEKIRKKIEDSLRELEEALKRVRDKEEDDKRLEDISRLVKRLLDESRRVLRELEETIRKRAEESKRVLEEVKRLVEKLIRELRKEAE

SEQ ID NO: 27310 - protein, 239 aa, Artificial Sequence
  Synthetic
SEDEIIKKIIEDLRRVLKEVEEIHKEVEERLDKRDHMVLHEYVNAAGITDRVLDEVKRIGDVETVLRLAIEAVRRALEIVRKVTEDLIRVVRKLLEIVDAVNKRVKKAVEDVLKLLRDTLKGSKDVERVLDEARRLLEKLHRDSRRILKRIAELLDELKELSERILERIKRLLEEVERRGSDDERLLEELIEELKDLIRRHIELLRRLIERLKELLKKHIEDLRRLLEEIEKLLEEARK

SEQ ID NO: 27311 - protein, 247 aa, Artificial Sequence
  Synthetic
SREEVLRELEEVIEDNRRLLEELIEKSKKVLDESLKLIDELLRRDHMVLHEYVNAAGITSKGDDEETARRIVTKIRKELEDVLDEVRRIVKEILDRDRRVAEDLKRVVDENLEKLKKVLDELDKKLGDRRLVEILRDIVRLLIEINERALRELLKLHEEHTRIVAELLRELERVVEELRRLVELIARGEISEDDLKRVVDEVEKKLRELKRRYKEALERIKEKIKELKDRYERAVREVVAELRKTTK

SEQ ID NO: 27312 - protein, 247 aa, Artificial Sequence
  Synthetic
SREEVLRELEEVIEDNRRLLEELIEKSKKVLDESLKLIDELLRRLEEVLERVLRLLEELSKGDDEETARRIVTKIRKELEDVLDEVRRIVKEILDRDRRVAEDLKRVVDENLEKLKKVLDELDKKLGDRRLVEILRDIVRLLIEINERALRELLKLHEEHTRIVAELLRELERVVEELRRLVELIARGEISEDDRDHMVLHEYVNAAGITRRYKEALERIKEKIKELKDRYERAVREVVAELRKTTK

SEQ ID NO: 27313 - protein, 247 aa, Artificial Sequence
  Synthetic
SREEVLRELEEVIEDNRRLLEELIEKSKKVLDESLKLIDELLRRLEEVLERVLRLLEELSKGDDEETARRIVTKIRKELEDVLDEVRRIVKEILDRDRRVAEDLKRVVDENLEKLKKVLDELDKKLGDRRLVEILRDIVRLLIEINERALRELLKLHEEHTRIVAELLRELERVVEELRRLVELIARGERDHMVLHEYVNAAGITLRELKRRYKEALERIKEKIKELKDRYERAVREVVAELRKTTK

SEQ ID NO: 27314 - protein, 230 aa, Artificial Sequence
  Synthetic
SKAEEIAEKLDRLLEENRRALEEITTRLDDLLRRDHMVLHEYVNAAGITLDDLRRGGIREELLKRIADVIRDIMRLLKELHDHTAEVIKTIKKLLKELHDINKEIIERLKRLKDGNVPKEELLKRVEELVRTSARLTTEVLKTVEKLIRDDKRLSEEILKRVKELIEELKRGVDSERVKEILERILRVVEEAVRLNEESLRRILDVVRKAVKLDRESLKKILDVVEEAVR

SEQ ID NO: 27315 - protein, 230 aa, Artificial Sequence
  Synthetic
SKAEEIAEKLDRLLEENRRALEEITTRLDDLLRRNKDALRKVMEKLKRLLDDLRRGGIREELLKRIADVIRDIMRLLKELHDHTAEVIKTIKKLLKELHDINKEIIERLKRLKDGNVPKEELLKRVEELVRTSARLTTEVLKTVEKLIRDDKRLSEEILKRVKELIEELRDHMVLHEYVNAAGITLRVVEEAVRLNEESLRRILDVVRKAVKLDRESLKKILDVVEEAVR

SEQ ID NO: 27316 - protein, 230 aa, Artificial Sequence
  Synthetic
SKAEEIAEKLDRLLEENRRALEEITTRLDDLLRRNKDRDHMVLHEYVNAAGITRRGGIREELLKRIADVIRDIMRLLKELHDHTAEVIKTIKKLLKELHDINKEIIERLKRLKDGNVPKEELLKRVEELVRTSARLTTEVLKTVEKLIRDDKRLSEEILKRVKELIEELKRGVDSERVKEILERILRVVEEAVRLNEESLRRILDVVRKAVKLDRESLKKILDVVEEAVR

SEQ ID NO: 27317 - protein, 230 aa, Artificial Sequence
  Synthetic
SKAEEIAEKLDRLLEENRRALEEITTRLDDLLRRNKDALRKVMEKLKRLLDDLRRGGIREELLKRIADVIRDIMRLLKELHDHTAEVIKTIKKLLKELHDINKEIIERLKRLKDGNVPKEELLKRVEELVRTSARLTTEVLKTVEKLIRDDKRLSEEILKRVKELIEELKRGRDHMVLHEYVNAAGITVEEAVRLNEESLRRILDVVRKAVKLDRESLKKILDVVEEAVR

SEQ ID NO: 27318 - protein, 230 aa, Artificial Sequence
  Synthetic
SKAEEIAEKLDRLLEENRRALEEITTRLDDLLRRNKRDHMVLHEYVNAAGITLRRGGIREELLKRIADVIRDIMRLLKELHDHTAEVIKTIKKLLKELHDINKEIIERLKRLKDGNVPKEELLKRVEELVRTSARLTTEVLKTVEKLIRDDKRLSEEILKRVKELIEELKRGVDSERVKEILERILRVVEEAVRLNEESLRRILDVVRKAVKLDRESLKKILDVVEEAVR

SEQ ID NO: 27319 - protein, 230 aa, Artificial Sequence
  Synthetic
SKAEEIAEKLDRLLEENRRALEEITTRLDDLLRRNKDALRDHMVLHEYVNAAGITGGIREELLKRIADVIRDIMRLLKELHDHTAEVIKTIKKLLKELHDINKEIIERLKRLKDGNVPKEELLKRVEELVRTSARLTTEVLKTVEKLIRDDKRLSEEILKRVKELIEELKRGVDSERVKEILERILRVVEEAVRLNEESLRRILDVVRKAVKLDRESLKKILDVVEEAVR

SEQ ID NO: 27320 - protein, 243 aa, Artificial Sequence
  Synthetic
SRVEELKKLIEDILRISREVVERIKRVAEDIHRINRRVLDDLRKLIEDILRTVEEILARKVGDTEIAERLRDTIARVVDEIAKLLEEHEKRSRELLEEIRKLLEDILRRSERAVEEIRELLKKGVSTKDVLRIIEEILREHLELLERVVRRIEEILRELLKTIEEIVKRIKEILEELKEVLKRGRVKDDEVERDHMVLHEYVNAAGITYRRLLEEIKRKLEEILRRVEELHRRLRRKLEEIDR

SEQ ID NO: 27321 - protein, 243 aa, Artificial Sequence
  Synthetic
SRVEELKKLIEDILRISREVVERIKRVAEDIHRINRRVRDHMVLHEYVNAAGITEILARKVGDTEIAERLRDTIARVVDEIAKLLEEHEKRSRELLEEIRKLLEDILRRSERAVEEIRELLKKGVSTKDVLRIIEEILREHLELLERVVRRIEEILRELLKTIEEIVKRIKEILEELKEVLKRGRVKDDEVEREIRRVKEDLDRILEEYRRLLEEIKRKLEEILRRVEELHRRLRRKLEEIDR

SEQ ID NO: 27322 - protein, 58 aa, Artificial Sequence; identical to SEQ ID NO: 26719
  Synthetic

SEQ ID NO: 27323 - protein, 58 aa, Artificial Sequence
  Synthetic
RGADALSRLLEELLRVVDDLIRVLKELIDKSRKVIEELLELLKRINEENLKVLAEIIK

SEQ ID NO: 27324 - protein, 58 aa, Artificial Sequence; identical to SEQ ID NO: 26723
  Synthetic

SEQ ID NO: 27325 - protein, 58 aa, Artificial Sequence; identical to SEQ ID NO: 26720
  Synthetic

SEQ ID NO: 27326 - protein, 58 aa, Artificial Sequence; identical to SEQ ID NO: 26703
  Synthetic

SEQ ID NO: 27327 - protein, 58 aa, Artificial Sequence; identical to SEQ ID NO: 26710
  Synthetic

SEQ ID NO: 27328 - protein, 58 aa, Artificial Sequence
  Synthetic
SDERRIAERIRELLRESKKLVRDVVEEAKRLLKENRDSTRKIIEDIRRLLRKIEDSTR

SEQ ID NO: 27329 - protein, 58 aa, Artificial Sequence; identical to SEQ ID NO: 26725
  Synthetic

SEQ ID NO: 27330 - protein, 58 aa, Artificial Sequence; identical to SEQ ID NO: 26705
  Synthetic

SEQ ID NO: 27331 - protein, 58 aa, Artificial Sequence; identical to SEQ ID NO: 26740
  Synthetic

SEQ ID NO: 27332 - protein, 58 aa, Artificial Sequence; identical to SEQ ID NO: 26711
  Synthetic

SEQ ID NO: 27333 - protein, 58 aa, Artificial Sequence; identical to SEQ ID NO: 26737
  Synthetic

SEQ ID NO: 27334 - protein, 58 aa, Artificial Sequence; identical to SEQ ID NO: 26721
  Synthetic

SEQ ID NO: 27335 - protein, 58 aa, Artificial Sequence; identical to SEQ ID NO: 26741
  Synthetic

SEQ ID NO: 27336 - protein, 58 aa, Artificial Sequence
  Synthetic
ISEDDLKRVVDEVEKKLRELKRRYAEALERIKEKIKELKDRYERAVREVVAELRKTTK

SEQ ID NO: 27337 - protein, 58 aa, Artificial Sequence; identical to SEQ ID NO: 26722
  Synthetic

SEQ ID NO: 27338 - protein, 58 aa, Artificial Sequence
  Synthetic
VDSERVKEILERILRVVEEAVRLNEESLRRILDVVRKAVKLDRESLKKILDVVEEAVR

SEQ ID NO: 27339 - protein, 58 aa, Artificial Sequence
  Synthetic
VKDDEVEREIRRVKEDLDRILEEYRRLLEEIKRKLEEILRRVEELHRRLRRKLEEIDR

SEQ ID NO: 27340 - protein, 58 aa, Artificial Sequence; identical to SEQ ID NO: 26731
  Synthetic

SEQ ID NO: 27341 - protein, 58 aa, Artificial Sequence; identical to SEQ ID NO: 27323
  Synthetic

SEQ ID NO: 27342 - protein, 58 aa, Artificial Sequence; identical to SEQ ID NO: 27323
  Synthetic

SEQ ID NO: 27343 - protein, 58 aa, Artificial Sequence; identical to SEQ ID NO: 26703
  Synthetic

SEQ ID NO: 27344 - protein, 58 aa, Artificial Sequence; identical to SEQ ID NO: 26720
  Synthetic

SEQ ID NO: 27345 - protein, 58 aa, Artificial Sequence; identical to SEQ ID NO: 26720
  Synthetic

SEQ ID NO: 27346 - protein, 58 aa, Artificial Sequence; identical to SEQ ID NO: 26720
  Synthetic

SEQ ID NO: 27347 - protein, 58 aa, Artificial Sequence; identical to SEQ ID NO: 26710
  Synthetic

SEQ ID NO: 27348 - protein, 58 aa, Artificial Sequence; identical to SEQ ID NO: 26710
  Synthetic

SEQ ID NO: 27349 - protein, 58 aa, Artificial Sequence; identical to SEQ ID NO: 26710
  Synthetic

SEQ ID NO: 27350 - protein, 58 aa, Artificial Sequence; identical to SEQ ID NO: 27328
  Synthetic

SEQ ID NO: 27351 - protein, 58 aa, Artificial Sequence; identical to SEQ ID NO: 26725
  Synthetic

SEQ ID NO: 27352 - protein, 58 aa, Artificial Sequence; identical to SEQ ID NO: 26725
  Synthetic

SEQ ID NO: 27353 - protein, 58 aa, Artificial Sequence; identical to SEQ ID NO: 26725
  Synthetic

SEQ ID NO: 27354 - protein, 58 aa, Artificial Sequence; identical to SEQ ID NO: 27336
  Synthetic

SEQ ID NO: 27355 - protein, 58 aa, Artificial Sequence; identical to SEQ ID NO: 26722
  Synthetic

SEQ ID NO: 27356 - protein, 58 aa, Artificial Sequence; identical to SEQ ID NO: 27338
  Synthetic

SEQ ID NO: 27357 - protein, 58 aa, Artificial Sequence; identical to SEQ ID NO: 26722
  Synthetic

SEQ ID NO: 27358 - protein, 58 aa, Artificial Sequence; identical to SEQ ID NO: 26722
  Synthetic

SEQ ID NO: 27359 - protein, 350 aa, Artificial Sequence
  Synthetic
SKEAVTKLQALNIKLAEKLLEAVTKLQALNIKLAEKLLEALARLQELNIALVYLAVELTDPKRIADEIKKVKDKSKEIVERAEEEIARAAAESKKILDEAEEEIARAAAESKKILDEGSGSGSDAVAELQALNLKLAELLLEAVAELQALNLKLAELLLEAIAKLQELNIKLVELLTKLTDPATIREAIRKVKEDSERIVAEAERLIAAAKAESERIIREAERLIAAAKAESERIIREGSGSGDPDVARLQELNIELARELLRDVARLQELNIELARELLRAAAELQELNIKLVELASELTDPDEARKAIARVKRESKRIVEDAERLPMSCAQESEKISREAERLIREAA

SEQ ID NO: 27360 - protein, 350 aa, Artificial Sequence
  Synthetic
SKEAVTKLQALNIKLAEKLLEAVTKLQALNIKLAEKLLEALARLQELNIALVYLAVELTDPKRIADEIKKVKDKSKEIVERAEEEIARAAAESKKILDEAEEEIARAAAESKKILDEGSGSGSDAVAELQALNLKLAELLLEAVAELQALNLKLAELLLEAIAKLQELNIKLVELLTKLTDPATIREAIRKVKEDSERIVAEAERLIAAAKAESERIIREAERLIAAAKAESERIIREGSGSGDPDVARLQELNIELARELLRDVARLQELNIELARELLRAAAELQELNIKLVELASELTDPDEARKAIARVKRESKRIVEDAERLAMSCAQESEKISREAERLIREAA

SEQ ID NO: 27361 - protein, 350 aa, Artificial Sequence
  Synthetic
SKEAVTKLQALNIKLAEKLLEAVTKLQALNIKLAEKLLEALARLQELNIALVYLAVELTDPKRIADEIKKVKDKSKEIVERAEEEIARAAAESKKILDEAEEEIARAAAESKKILDEGSGSGSDAVAELQALNLKLAELLLEAVAELQALNLKLAELLLEAIAKLQELNIKLVELLTKLTDPATIREAIRKVKEDSERIVAEAERLIAAAKAESERIIREAERLIAAAKAESERIIREGSGSGDPDVARLQELNIELARELLRDVARLQELNIELARELLRAAAELQELNIKLVELASELTDPDEARKAIARVKRESKRIVEDAERLIRECAAASEKISREAERLIREAA

SEQ ID NO: 27362 - protein, 347 aa, Artificial Sequence
  Synthetic
SKEAVTKLQALNIKLAEKLLEAVTKLQALNIKLAEKLLEALARLQELNIALVYLAVELTDPKRIADEIKKVKDKSKEIVERAEEEIARAAAESKKILDEAEEEIARAAAESKKILDEGSGSGSDAVAELQALNLKLAELLLEAVAELQALNLKLAELLLEAIAKLQELNIKLVELLTKLTDPATIREAIRKVKEDSERIVAEAERLIAAAKAESERIIREAERLIAAAKAESERIIREGSGSGDPDVARLQELNIELARELLRDVARLQELNIELARELLRAAAELQELNIKLVELASELTDPDEARKAIARVKRESKRIVEDLIMSCAQESAASEKISREAERLIR

SEQ ID NO: 27363 - protein, 343 aa, Artificial Sequence
  Synthetic
SKEAVTKLQALNIKLAEKLLEAVTKLQALNIKLAEKLLEALARLQELNIALVYLAVELTDPKRIADEIKKVKDKSKEIVERAEEEIARAAAESKKILDEAEEEIARAAAESKKILDEGSGSGSDAVAELQALNLKLAELLLEAVAELQALNLKLAELLLEAIAKLQELNIKLVELLTKLTDPATIREAIRKVKEDSERIVAEAERLIAAAKAESERIIREAERLIAAAKAESERIIREGSGSGDPDVARLQELNIELARELLRDVARLQELNIELARELLRAAAELQELNIKLVELASELTDPDEARKAIARVKRESKRLVMSCAQESREAAAASEKISREAE

SEQ ID NO: 27364 - protein, 228 aa, Artificial Sequence
  Synthetic
NKEDATEAQKKAIRAAEELLKDVTRIQERAIREAEKALERLARVQEEAIRRVYEAVESKNKEELKKVKEEIEELLRRLKRELDELEREIRELLKEIKEKADRLEKEIRDLIERIRRDRNASDEVVTRLARLNEELIRELREDVRRLAELNKELLRELERAARELARLNEKLLELADRVETEEEARKAIARVKRESKRIVEDAERLAMSCAQESEKISREAERLIREAA

SEQ ID NO: 27365 - protein, 225 aa, Artificial Sequence
  Synthetic
NKEDATEAQKKAIRAAEELLKDVTRIQERAIREAEKALERLARVQEEAIRRVYEAVESKNKEELKKVKEEIEELLRRLKRELDELEREIRELLKEIKEKADRLEKEIRDLIERIRRDRNASDEVVTRLARLNEELIRELREDVRRLAELNKELLRELERAARELARLNEKLLELADRVETEEEARKAIARVKRESKRIVEDLIMSCAQESAASEKISREAERLIR

SEQ ID NO: 27366 - protein, 232 aa, Artificial Sequence
  Synthetic
DERLKRLNERLADELDKDLERLLRLNEELARELTRAAEELRELNEKLVELAKKLQGGRSREVAERAEKEREKIRRKLEEIKKEIKEDADRIKKRADELRRRLEKTLEDAARELEKLKREPRTEELKRKATELQKEAIRRAEELLKEVTDVQRRAIERAEELLEKLARLQEEAIRTVYLLVELNKVDRARKAIARVKRESKRIVEDAERLAMSCAQESEKISREAERLIREAA

SEQ ID NO: 27367 - protein, 229 aa, Artificial Sequence
  Synthetic
DERLKRLNERLADELDKDLERLLRLNEELARELTRAAEELRELNEKLVELAKKLQGGRSREVAERAEKEREKIRRKLEEIKKEIKEDADRIKKRADELRRRLEKTLEDAARELEKLKREPRTEELKRKATELQKENIRRAEELLKEVTDVQRRNIERAEELLEKLARLQEENIRTVYLLVELNKVDRARKAIARVKRESKRIVEDLIMSCAQESAASEKISREAERLIR

SEQ ID NO: 27368 - protein, 359 aa, Artificial Sequence
  Synthetic
SKEAAKKLQDLNIELARKLLEASTKLQRLNIRLAEALLEAIARLQELNLELVYLAVELTDPKRIRDEIKEVKDKSKEIIRRAEKEIDDAAKESKKILEEARKAIRDAAEESRKILEEGSGSGSDALDELQKLNLELAKLLLKAIAETQDLNLRAAKAFLEAAAKLQELNIRAVELLVKLTDPATIRRALEHAKRRSKEIIDEAERAIRAAKRESERIIEEARRLIEKAKEESERIIREGSGSGDPDIKKLQDLNIELARELLRAHAQLQRLNLELLRELLRALAQLQELNLDLLRLASELTDPDEARKAIARVKRESKRIVEDAERLSREAAALSMSCAQESERSIREAAAASEKISRE

SEQ ID NO: 27369 - protein, 353 aa, Artificial Sequence
  Synthetic
SKEAAKKLQDLNIELARKLLEASTKLQRLNIRLAEALLEAIARLQELNLELVYLAVELTDPKRIRDEIKEVKDKSKEIIRRAEKEIDDAAKESKKILEEARKAIRDAAEESRKILEEGSGSGSDALDELQKLNLELAKLLLKAIAETQDLNLRAAKAFLEAAAKLQELNIRAVELLVKLTDPATIRRALEHAKRRSKEIIDEAERAIRAAKRESERIIEEARRLIEKAKEESERIIREGSGSGDPDIKKLQDLNIELARELLRAHAQLQRLNLELLRELLRALAQLQELNLDLLRLASELTDPDEARKAIARVKRESKRIVEDAERLSMSCAQESEKISREAERSIREAAAAS

SEQ ID NO: 27370 - protein, 288 aa, Artificial Sequence
  Synthetic
SELARKLLEASTKLQRLNIRLAEALLEAIARLQELNLELVYLAVELTDPKRIRDEIKEVKDKSKEIIRRAEKEIDDAAKESEKILEEAREAISGSGSELAKLLLKAIAETQDLNLRAAKAFLEAAAKLQELNIRAVELLVKLTDPATIREALEHAKRRSKEIIDEAERAIRAAKRESERIIEEARRLIEKGSGSGSELARELLRAHAQLQRLNLELLRELLRALAQLQELNLDLLRLASELTDPDEARKAIARVKRESKRIVEDLEMSCAQESAASEKISREAERLIR

SEQ ID NO: 27371 - protein, 283 aa, Artificial Sequence
  Synthetic
SELARKLLEASTKLQRLNIRLAEALLEAIARLQELNLELVYLAVELTDPKRIRDEIKEVKDKSKEIIRRAEKEIDDAAKESEKILEEAREAISGSGSELAKLLLKAIAETQDLNLRAAKAFLEAAAKLQELNIRAVELLVKLTDPATIREALEHAKRRSKEIIDEAERAIRAAKRESERIIEEARRLIEKGSGSGSELARELLRAHAQLQRLNLELLRELLRALAQLQELNLDLLRLASELTDPDEARKAIARVKRESKRLVMSCAQESREAAAASEKISREA

SEQ ID NO: 27372 - protein, 280 aa, Artificial Sequence
  Synthetic
SELARKLLEASTKLQRLNIRLAEALLEAIARLQELNLELVYLAVELTDPKRIRDEIKEVKDKSKEIIRRAEKEIDDAAKESEKILEEAREAISGSGSELAKLLLKAIAETQDLNLRAAKAFLEAAAKLQELNIRAVELLVKLTDPATIREALEHAKRRSKEIIDEAERAIRAAKRESERIIEEARRLIEKGSGSGSELARELLRAHAQLQRLNLELLRELLRALAQLQELNLDLLRLASELTDPDEARKAIARVKRLSMSCAQESERLIREAAAASEKIK

SEQ ID NO: 27373 - protein, 277 aa, Artificial Sequence
  Synthetic
SELARKLLEASTKLQRLNIRLAEALLEAIARLQELNLELVYLAVELTDPKRIRDEIKEVKDKSKEIIRRAEKEIDDAAKESEKILEEAREAISGSGSELAKLLLKAIAETQDLNLRAAKAFLEAAAKLQELNIRAVELLVKLTDPATIREALEHAKRRSKEIIDEAERAIRAAKRESERIIEEARRLIEKGSGSGSELARELLRAHAQLQRLNLELLRELLRALAQLQELNLDLLRLASELTDPDEARKAIARLKMSCAQESEDAERLIREAAAASE

SEQ ID NO: 27374 - protein, 353 aa, Artificial Sequence
  Synthetic
SHAAVIKLSDLNIRLLDKLLQAVIKLTELNAELNRKLIEALQRLFDLNVALVHLAAELTDPKRIADEIKKVKDKSKEIVERAEEEIARAAAESKKILDEAEEEIARAAAESKKILDEGSGSGSDAVAELQALNLKLAELLLEAVAELQALNLKLAELLLEAIAKLQELNIKLVELLTKLTDPATIREAIRKVKEDSERIVAEAERLIAAAKAESERIIREAERLIAAAKAESERIIREGSGSNDPQVAQNQETFIELARDALRLVAENQEAFIEVARLTLRAAALAQEVAIKAVEAASEGGSGSGPNKEEIEKLAKEAREKLKKAEKEHKMSCAQERKKNKKAREDLKKKADK

SEQ ID NO: 27375 - protein, 349 aa, Artificial Sequence
  Synthetic
SHAAVIKLSDLNIRLLDKLLQAVIKLTELNAELNRKLIEALQRLFDLNVALVHLAAELTDPKRIADEIKKVKDKSKEIVERAEEEIARAAAESKKILDEAEEEIARAAAESKKILDEGSGSGSDAVAELQALNLKLAELLLEAVAELQALNLKLAELLLEAIAKLQELNIKLVELLTKLTDPATIREAIRKVKEDSERIVAEAERLIAAAKAESERIIREAERLIAAAKAESERIIREGSGSNDPQVAQNQETFIELARDALRLVAENQEAFIEVARLTLRAAALAQEVAIKAVEAASEGGSGSGPNKEEIEKLAKEAREKLKKAEMSCAQEHDKLRKKNKKAREDLKK

SEQ ID NO: 27376 - protein, 353 aa, Artificial Sequence
  Synthetic
SLEAVLKLAELNLKLSDKLAEAVQKLAALLNKLLEKLSEALQRLFELNVALVTLAIELTDPKRIADEIKKVKDKSKEIVERAEEEIARAAAESKKILDEAEEEIARAAAESKKILDEGSGSGSDAVAELQALNLKLAELLLEAVAELQALNLKLAELLLEAIAKLQELNIKLVELLTKLTDPATIREAIRKVKEDSERIVAEAERLIAAAKAESERIIREAERLIAAAKAESERIIREGSGSNDPLVARLQELLIEHARELLRLVATSQEIFIELARAFLANAAQLQEAAIKAVEAASENGSGSGPSSEKVRRELKESLKENHKQNQKLLMSCAQEQEKLNRELEELKKKHKK

SEQ ID NO: 27377 - protein, 349 aa, Artificial Sequence
  Synthetic
SLEAVLKLAELNLKLSDKLAEAVQKLAALLNKLLEKLSEALQRLFELNVALVTLAIELTDPKRIADEIKKVKDKSKEIVERAEEEIARAAAESKKILDEAEEEIARAAAESKKILDEGSGSGSDAVAELQALNLKLAELLLEAVAELQALNLKLAELLLEAIAKLQELNIKLVELLTKLTDPATIREAIRKVKEDSERIVAEAERLIAAAKAESERIIREAERLIAAAKAESERIIREGSGSNDPLVARLQELLIEHARELLRLVATSQEIFIELARAFLANAAQLQEAAIKAVEAASENGSGSGPSSEKVRRELKESLKENHKQNMSCAQEHKRAQEKLNRELEELKK

SEQ ID NO: 27378 - protein, 229 aa, Artificial Sequence
  Synthetic
LIERLTRLEKEHVRELKRLLDTSLEILRRLVEAFETNLRQLKEALKRALEAANLHNEEVEEVLRKLEEDLRRLEEELRKTLDDVRKEVKRLKEELDKRIKEVEDELRKIKEKLKKGDKNEKRVLEEILRLAEDVLKKSDKLAKDVQERARELNEILEELSRKLQELFERVVEEVTRNVPTTERIEKVRRELKESLKENHKQNQKLLMSCAQEQEKLNRELEELKKKHKK

SEQ ID NO: 27379 - protein, 225 aa, Artificial Sequence
  Synthetic
LIERLTRLEKEHVRELKRLLDTSLEILRRLVEAFETNLRQLKEALKRALEAANLHNEEVEEVLRKLEEDLRRLEEELRKTLDDVRKEVKRLKEELDKRIKEVEDELRKIKEKLKKGDKNEKRVLEEILRLAEDVLKKSDKLAKDVQERARELNEILEELSRKLQELFERVVEEVTRNVPTTERIEKVRRELKESLKENHKLNMSCAQEHKRAQEKLNRELEELKK

SEQ ID NO: 27380 - protein, 233 aa, Artificial Sequence
  Synthetic
SEERVLELAEEALRLSDEAAKEIQELARRLNEELEKLSKELQDLFERIVETVTRLIDADEETLKRAAEEIKKRLEDARKKAKEAADKAREELDRARKKLKELVDEIRKKAKDALEKAGADEELVARLLRLLEEHARELERLLRTSARIIERLLDAFRRNLEQLKEAADKAVEAAEEAVRRVEDVRVWSEKVRRELKESLKENHKQNQKLLMSCAQEQEKLNRELEELKKKHKK

SEQ ID NO: 27381 - protein, 229 aa, Artificial Sequence
  Synthetic
SEERVLELAEEALRLSDEAAKEIQELARRLNEELEKLSKELQDLFERIVETVTRLIDADEETLKRAAEEIKKRLEDARKKAKEAADKAREELDRARKKLKELVDEIRKKAKDALEKAGADEELVARLLRLLEEHARELERLLRTSARIIERLLDAFRRNLEQLKEAADKAVEAAEEAVRRVEDVRVWSEKVRRELKESLKENHKLNMSCAQEHKRAQEKLNRELEELKK

SEQ ID NO: 27382 - protein, 353 aa, Artificial Sequence
  Synthetic
SLEAALKLAELNLKLSDKLAEASQKLAALLNKLLEKLSEAIQRLFELNLALVTLAIELTDPKRIADEIKKVKDKSKEIIERAEEEIARAAAESKKILDEAEEEIARAAAESKKILDEGSGSGSDALAELQALNLKLAELLLEAIAETQALNLKAAEAFLEAAAKLQELNIKAVELLVKLTDPATIREALRKAKEDSERIIAEAERAIAAAKAESERIIREAERLIAAAKAESERIIREGSGSNDPLIARLQELLIEHARELLRLHATSQEIFVELLRAFLANLAQLQEAALKALEAASENGSGSGPSSEKVRRELKESLKENHKQNQKLLMSCAQEQEKLNRELEELKKKHKK

SEQ ID NO: 27383 - protein, 353 aa, Artificial Sequence
  Synthetic
SLEAVLKLFELNHKLSEKLLEAVLKLHALNQKLSQKLLEALARLLELNVALVELAIELTDPKRIADEIKKVKDKSKEIVERAEEEIARAAAESKKILDEAEEEIARAAAESKKILDEGSGSGSDAVAELQALNLKLAELLLEAVAELQALNLKLAELLLEAIAKLQELNIKLVELLTKLTDPATIREAIRKVKEDSERIVAEAERLIAAAKAESERIIREAERLIAAAKAESERIIREGSGSGDPEVARLQEAFIEQAREILRNVAAAQEALIEQARRLLALAALAQEAAIKAVELASEHGSGSGPDTVKRILEELRRRFEKLAKDLDDIAMSCAQEHKKHNKELKDKQRKIK

SEQ ID NO: 27384 - protein, 165 aa, Artificial Sequence
  Synthetic
SVEELLRKLEEVLRKIREENERSLKELRDRAREIVKRNRETNRELEEVIKELEKRLSGADKEKVEELVRRIRRIVERVVEEDRRTVEEIEKIAREVVKRDRDSADRVRRTVEDVLRKATGSEDIVRKIERIVETIEREVRELIMSCAQESRDIRRKVDESVKNVE

SEQ ID NO: 27385 - protein, 168 aa, Artificial Sequence
  Synthetic
SVEELLRKLEEVLRKIREENERSLKELRDRAREIVKRNRETNRELEEVIKELEKRLSGADKEKVEELVRRIRRIVERVVEEDRRTVEEIEKIAREVVKRDRDSADRVRRTVEDVLRKATGSEDIVRKIERIVETIEREVRESVKLVMSCAQESRRKVDESVKNVEKLL

SEQ ID NO: 27386 - protein, 172 aa, Artificial Sequence
  Synthetic
SVEELLRKLEEVLRKIREENERSLKELRDRAREIVKRNRETNRELEEVIKELEKRLSGADKEKVEELVRRIRRIVERVVEEDRRTVEEIEKIAREVVKRDRDSADRVRRTVEDVLRKATGSEDIVRKIERIVETIEREVRESVKKVEELAMSCAQESDESVKNVEKLLRDVD

SEQ ID NO: 27387 - protein, 176 aa, Artificial Sequence
  Synthetic
SVEELLRKLEEVLRKIREENERSLKELRDRAREIVKRNRETNRELEEVIKELEKRLSGADKEKVEELVRRIRRIVERVVEEDRRTVEEIEKIAREVVKRDRDSADRVRRTVEDVLRKATGSEDIVRKIERIVETIEREVRESVKKVEEIARDLRMSCAQESKNVEKLLRDVDKKAR

SEQ ID NO: 27388 - protein, 179 aa, Artificial Sequence
  Synthetic
SVEELLRKLEEVLRKIREENERSLKELRDRAREIVKRNRETNRELEEVIKELEKRLSGADKEKVEELVRRIRRIVERVVEEDRRTVEEIEKIAREVVKRDRDSADRVRRTVEDVLRKATGSEDIVRKIERIVETIEREVRESVKKVEEIARDIRRLGMSCAQESEKLLRDVDKKARDRK

SEQ ID NO: 27389 - protein, 180 aa, Artificial Sequence
  Synthetic
SVEELLRKLEEVLRKIREENERSLKELRDRAREIVKRNRETNRELEEVIKELEKRLSGADKEKVEELVRRIRRIVERVVEEDRRTVEEIEKIAREVVKRDRDSADRVRRTVEDVLRKATGSEDIVRKIERIVETIEREVRESVKKVEEIARDIRRKLDMSCAQESKLLRDVDKKARDRKK

SEQ ID NO: 27390 - protein, 157 aa, Artificial Sequence
  Synthetic
DEVEKVLEEIKRALDDLRKKVEESKREIKEALKAVEKHTRDSDTANKRTLAEIERGVKSKDTERVRKLVEELSEENERSLREVRRVAEELLEINERVLEEVERVVEALLDLVRRGGSERVVEEVRRVLEELRRLAMSCAQESRRAIERLAREDARVS

SEQ ID NO: 27391 - protein, 161 aa, Artificial Sequence
  Synthetic
DEVEKVLEEIKRALDDLRKKVEESKREIKEALKAVEKHTRDSDTANKRTLAEIERGVKSKDTERVRKLVEELSEENERSLREVRRVAEELLEINERVLEEVERVVEALLDLVRRGGSERVVEEVRRVLEELRRRLEKLKMSCAQESERLAREDARVSKKSI

SEQ ID NO: 27392 - protein, 164 aa, Artificial Sequence
  Synthetic
DEVEKVLEEIKRALDDLRKKVEESKREIKEALKAVEKHTRDSDTANKRTLAEIERGVKSKDTERVRKLVEELSEENERSLREVRRVAEELLEINERVLEEVERVVEALLDLVRRGGSERVVEEVRRVLEELRRRLEKVTELAMSCAQESAREDARVSKKSIDVN

SEQ ID NO: 27393 - protein, 168 aa, Artificial Sequence
  Synthetic
DEVEKVLEEIKRALDDLRKKVEESKREIKEALKAVEKHTRDSDTANKRTLAEIERGVKSKDTERVRKLVEELSEENERSLREVRRVAEELLEINERVLEEVERVVEALLDLVRRGGSERVVEEVRRVLEELRRRLEKVTEDSRRLLMSCAQESARVSKKSIDVNKKLD

SEQ ID NO: 27394 - protein, 172 aa, Artificial Sequence
  Synthetic
DEVEKVLEEIKRALDDLRKKVEESKREIKEALKAVEKHTRDSDTANKRTLAEIERGVKSKDTERVRKLVEELSEENERSLREVRRVAEELLEINERVLEEVERVVEALLDLVRRGGSERVVEEVRRVLEELRRRLEKVTEDSRRAIERLKMSCAQESKKSIDVNKKLDDDVR

SEQ ID NO: 27395 - protein, 163 aa, Artificial Sequence
  Synthetic
DAEELVRELEERIKRSHERLEELLREVKRLIERSHEELKRLNEEVLRELDRVLDEVAKRGSDSEELLRELEERVARIKERSKESYARSKESLDRAKEVLEELYRASKRSLEEFERELREKGVDKDSARELERIVKENAELAMSCAQESEKIVRENTKLAEDSV

SEQ ID NO: 27396 - protein, 164 aa, Artificial Sequence
  Synthetic
DAEELVRELEERIKRSHERLEELLREVKRLIERSHEELKRLNEEVLRELDRVLDEVAKRGSDSEELLRELEERVARIKERSKESYARSKESLDRAKEVLEELYRASKRSLEEFERELREKGVDKDSARELERIVKENAELLYMSCAQESKIVRENTKLAEDSVR

SEQ ID NO: 27397 - protein, 167 aa, Artificial Sequence
  Synthetic
DAEELVRELEERIKRSHERLEELLREVKRLIERSHEELKRLNEEVLRELDRVLDEVAKRGSDSEELLRELEERVARIKERSKESYARSKESLDRAKEVLEELYRASKRSLEEFERELREKGVDKDSARELERIVKENAELAERLYMSCAQESRENTKLAEDSVRELK

SEQ ID NO: 27398 - protein, 168 aa, Artificial Sequence
  Synthetic
DAEELVRELEERIKRSHERLEELLREVKRLIERSHEELKRLNEEVLRELDRVLDEVAKRGSDSEELLRELEERVARIKERSKESYARSKESLDRAKEVLEELYRASKRSLEEFERELREKGVDKDSARELERIVKENAELAERVLKMSCAQESENTKLAEDSVRELKR

SEQ ID NO: 27399 - protein, 171 aa, Artificial Sequence
  Synthetic
DAEELVRELEERIKRSHERLEELLREVKRLIERSHEELKRLNEEVLRELDRVLDEVAKRGSDSEELLRELEERVARIKERSKESYARSKESLDRAKEVLEELYRASKRSLEEFERELREKGVDKDSARELERIVKENAELAERVFRELAMSCAQESKLAEDSVRELKRLVE

SEQ ID NO: 27400 - protein, 174 aa, Artificial Sequence
  Synthetic
DAEELVRELEERIKRSHERLEELLREVKRLIERSHEELKRLNEEVLRELDRVLDEVAKRGSDSEELLRELEERVARIKERSKESYARSKESLDRAKEVLEELYRASKRSLEEFERELREKGVDKDSARELERIVKENAELAERVFREVEKLVMSCAQESEDSVRELKRLVEELK

SEQ ID NO: 27401 - protein, 177 aa, Artificial Sequence
  Synthetic
DAEELVRELEERIKRSHERLEELLREVKRLIERSHEELKRLNEEVLRELDRVLDEVAKRGSDSEELLRELEERVARIKERSKESYARSKESLDRAKEVLEELYRASKRSLEEFERELREKGVDKDSARELERIVKENAELAERVFREVEKIVRLTMSCAQESVRELKRLVEELKKRA

SEQ ID NO: 27402 - protein, 178 aa, Artificial Sequence
  Synthetic
DAEELVRELEERIKRSHERLEELLREVKRLIERSHEELKRLNEEVLRELDRVLDEVAKRGSDSEELLRELEERVARIKERSKESYARSKESLDRAKEVLEELYRASKRSLEEFERELREKGVDKDSARELERIVKENAELAERVFREVEKIVRELLMSCAQESRELKRLVEELKKRAK

SEQ ID NO: 27403 - protein, 162 aa, Artificial Sequence
  Synthetic
SAADEVVERMKELVATVKRENDEVVKELKKLVKELEDDNRRVVEESKKSVEDLARRVGKDKREVVEEVRRTSKELVERNEETAKRVDDLVRRLVEENRRSVTEVEELVKELVKELRRGSGSEDLVREVEKRVRDIVEELQMSCAQESKAVEDIIEKSKRIAE

SEQ ID NO: 27404 - protein, 165 aa, Artificial Sequence
  Synthetic
SAADEVVERMKELVATVKRENDEVVKELKKLVKELEDDNRRVVEESKKSVEDLARRVGKDKREVVEEVRRTSKELVERNEETAKRVDDLVRRLVEENRRSVTEVEELVKELVKELRRGSGSEDLVREVEKRVRDIVEESRKLAMSCAQESEDIIEKSKRIAEDTL

SEQ ID NO: 27405 - protein, 173 aa, Artificial Sequence
  Synthetic
SAADEVVERMKELVATVKRENDEVVKELKKLVKELEDDNRRVVEESKKSVEDLARRVGKDKREVVEEVRRTSKELVERNEETAKRVDDLVRRLVEENRRSVTEVEELVKELVKELRRGSGSEDLVREVEKRVRDIVEESRKLAEETRKALEMSCAQESRIAEDTLEKNKEMVE

SEQ ID NO: 27406 - protein, 176 aa, Artificial Sequence
  Synthetic
SAADEVVERMKELVATVKRENDEVVKELKKLVKELEDDNRRVVEESKKSVEDLARRVGKDKREVVEEVRRTSKELVERNEETAKRVDDLVRRLVEENRRSVTEVEELVKELVKELRRGSGSEDLVREVEKRVRDIVEESRKLAEETRKAVEDLIMSCAQESEDTLEKNKEMVERLE

SEQ ID NO: 27407 - protein, 159 aa, Artificial Sequence
  Synthetic
SESDEVIRDLARLLDELARHVDDSVRRMDEVVKRSTREADELAKRLDELVKEVEKKPGDERVERMVAEIERLVAEVLEELKKKYEKLKREVEENLRRLEETVRDIVEKARKVTEKGVSKEKIDRIIRELERILEELIMSCAQESRRLEDSLRRVAELLK

SEQ ID NO: 27408 - protein, 162 aa, Artificial Sequence
  Synthetic
SESDEVIRDLARLLDELARHVDDSVRRMDEVVKRSTREADELAKRLDELVKEVEKKPGDERVERMVAEIERLVAEVLEELKKKYEKLKREVEENLRRLEETVRDIVEKARKVTEKGVSKEKIDRIIRELERILEEAKKLHMSCAQESEDSLRRVAELLKAAL

SEQ ID NO: 27409 - protein, 163 aa, Artificial Sequence
  Synthetic
SESDEVIRDLARLLDELARHVDDSVRRMDEVVKRSTREADELAKRLDELVKEVEKKPGDERVERMVAEIERLVAEVLEELKKKYEKLKREVEENLRRLEETVRDIVEKARKVTEKGVSKEKIDRIIRELERILEEAKKKLLMSCAQESDSLRRVAELLKAALD

SEQ ID NO: 27410 - protein, 166 aa, Artificial Sequence
  Synthetic
SESDEVIRDLARLLDELARHVDDSVRRMDEVVKRSTREADELAKRLDELVKEVEKKPGDERVERMVAEIERLVAEVLEELKKKYEKLKREVEENLRRLEETVRDIVEKARKVTEKGVSKEKIDRIIRELERILEEAKKKHEDLLMSCAQESRRVAELLKAALDRLR

SEQ ID NO: 27411 - protein, 169 aa, Artificial Sequence
  Synthetic
SESDEVIRDLARLLDELARHVDDSVRRMDEVVKRSTREADELAKRLDELVKEVEKKPGDERVERMVAEIERLVAEVLEELKKKYEKLKREVEENLRRLEETVRDIVEKARKVTEKGVSKEKIDRIIRELERILEEAKKKHEDVLRLLMSCAQESAELLKAALDRLREIV

SEQ ID NO: 27412 - protein, 159 aa, Artificial Sequence
  Synthetic
SESDEVIRDLARLLDELARHVDDSVRRMDEVVKRSTREADELAKRLDELVKEVEKKPGDERVERMVAEIERLVAEVLEELKKKYEKLKREVEENLRRLEETVRDIVEKARKVTEKGVSKEKIDRIIRELERILEELKMSCAQESRRLEDSLRRVAELLK

SEQ ID NO: 27413 - protein, 162 aa, Artificial Sequence; identical to SEQ ID NO: 27408
  Synthetic

SEQ ID NO: 27414 - protein, 163 aa, Artificial Sequence
  Synthetic
SESDEVIRDLARLLDELARHVDDSVRRMDEVVKRSTREADELAKRLDELVKEVEKKPGDERVERMVAEIERLVAEVLEELKKKYEKLKREVEENLRRLEETVRDIVEKARKVTEKGVSKEKIDRIIRELERILEEAKKKLSMSCAQESDSLRRVAELLKAALD

SEQ ID NO: 27415 - protein, 166 aa, Artificial Sequence; identical to SEQ ID NO: 27410
  Synthetic

SEQ ID NO: 27416 - protein, 169 aa, Artificial Sequence; identical to SEQ ID NO: 27411
  Synthetic

SEQ ID NO: 27417 - protein, 159 aa, Artificial Sequence
  Synthetic
SESDDVIRKLRELLEELRTHVEKSIRDLRKILEDSTRHAKRSIEELERLLEEVRKKPGDEEVRKTVEEISRRVAENVKRLEDLYRRMEEEVKKNLDRLRKRVEDIIREVEEARKKGVDEEKLKDLIRKLRDILRRLAMSCAQESDDARESLERAKREHE

SEQ ID NO: 27418 - protein, 162 aa, Artificial Sequence
  Synthetic
SESDDVIRKLRELLEELRTHVEKSIRDLRKILEDSTRHAKRSIEELERLLEEVRKKPGDEEVRKTVEEISRRVAENVKRLEDLYRRMEEEVKKNLDRLRKRVEDIIREVEEARKKGVDEEKLKDLIRKLRDILRRAAELHMSCAQESRESLERAKREHEKLI

SEQ ID NO: 27419 - protein, 163 aa, Artificial Sequence
  Synthetic
SESDDVIRKLRELLEELRTHVEKSIRDLRKILEDSTRHAKRSIEELERLLEEVRKKPGDEEVRKTVEEISRRVAENVKRLEDLYRRMEEEVKKNLDRLRKRVEDIIREVEEARKKGVDEEKLKDLIRKLRDILRRAAEALKMSCAQESESLERAKREHEKLID

SEQ ID NO: 27420 - protein, 166 aa, Artificial Sequence
  Synthetic
SESDDVIRKLRELLEELRTHVEKSIRDLRKILEDSTRHAKRSIEELERLLEEVRKKPGDEEVRKTVEEISRRVAENVKRLEDLYRRMEEEVKKNLDRLRKRVEDIIREVEEARKKGVDEEKLKDLIRKLRDILRRAAEAHKKLIMSCAQESERAKREHEKLIDRLK

SEQ ID NO: 27421 - protein, 169 aa, Artificial Sequence
  Synthetic
SESDDVIRKLRELLEELRTHVEKSIRDLRKILEDSTRHAKRSIEELERLLEEVRKKPGDEEVRKTVEEISRRVAENVKRLEDLYRRMEEEVKKNLDRLRKRVEDIIREVEEARKKGVDEEKLKDLIRKLRDILRRAAEAHKKLIDLGMSCAQESKREHEKLIDRLKKIL

SEQ ID NO: 27422 - protein, 170 aa, Artificial Sequence
  Synthetic
SESDDVIRKLRELLEELRTHVEKSIRDLRKILEDSTRHAKRSIEELERLLEEVRKKPGDEEVRKTVEEISRRVAENVKRLEDLYRRMEEEVKKNLDRLRKRVEDIIREVEEARKKGVDEEKLKDLIRKLRDILRRAAEAHKKLIDDLRMSCAQESREHEKLIDRLKKILE

SEQ ID NO: 27423 - protein, 173 aa, Artificial Sequence
  Synthetic
SESDDVIRKLRELLEELRTHVEKSIRDLRKILEDSTRHAKRSIEELERLLEEVRKKPGDEEVRKTVEEISRRVAENVKRLEDLYRRMEEEVKKNLDRLRKRVEDIIREVEEARKKGVDEEKLKDLIRKLRDILRRAAEAHKKLIDDARELLMSCAQESEKLIDRLKKILEELE

SEQ ID NO: 27424 - protein, 159 aa, Artificial Sequence; identical to SEQ ID NO: 27417
  Synthetic

SEQ ID NO: 27425 - protein, 162 aa, Artificial Sequence; identical to SEQ ID NO: 27418
  Synthetic

SEQ ID NO: 27426 - protein, 163 aa, Artificial Sequence; identical to SEQ ID NO: 27419
  Synthetic

SEQ ID NO: 27427 - protein, 166 aa, Artificial Sequence; identical to SEQ ID NO: 27420
  Synthetic

SEQ ID NO: 27428 - protein, 170 aa, Artificial Sequence; identical to SEQ ID NO: 27422
  Synthetic

SEQ ID NO: 27429 - protein, 173 aa, Artificial Sequence; identical to SEQ ID NO: 27423
  Synthetic

SEQ ID NO: 27430 - protein, 163 aa, Artificial Sequence
  Synthetic
DREREVKKRLDEVRERIERLLRRVEEESRRVAEEIRRLIEEVRRRNKKVTEEIRELLKGLKDKEEVRRVLERLRKLNAESDELLERILERLRRLVEATNRLVKAIIEELRRLVEKIVREVPDSEELREELKKLERKIEKLAMSCAQESKEVTERLEDLLRRIT

SEQ ID NO: 27431 - protein, 167 aa, Artificial Sequence
  Synthetic
DREREVKKRLDEVRERIERLLRRVEEESRRVAEEIRRLIEEVRRRNKKVTEEIRELLKGLKDKEEVRRVLERLRKLNAESDELLERILERLRRLVEATNRLVKAIIEELRRLVEKIVREVPDSEELREELKKLERKIEKVAKELKMSCAQESERLEDLLRRITEHAR

SEQ ID NO: 27432 - protein, 174 aa, Artificial Sequence
  Synthetic
DREREVKKRLDEVRERIERLLRRVEEESRRVAEEIRRLIEEVRRRNKKVTEEIRELLKGLKDKEEVRRVLERLRKLNAESDELLERILERLRRLVEATNRLVKAIIEELRRLVEKIVREVPDSEELREELKKLERKIEKVAKEIHDHDKELEMSCAQESRRITEHARKSDREIE

SEQ ID NO: 27433 - protein, 163 aa, Artificial Sequence; identical to SEQ ID NO: 27430
  Synthetic

SEQ ID NO: 27434 - protein, 167 aa, Artificial Sequence
  Synthetic
DREREVKKRLDEVRERIERLLRRVEEESRRVAEEIRRLIEEVRRRNKKVTEEIRELLKGLKDKEEVRRVLERLRKLNAESDELLERILERLRRLVEATNRLVKAIIEELRRLVEKIVREVPDSEELREELKKLERKIEKVAKELHMSCAQESERLEDLLRRITEHAR

SEQ ID NO: 27435 - protein, 174 aa, Artificial Sequence; identical to SEQ ID NO: 27432
  Synthetic

SEQ ID NO: 27436 - protein, 169 aa, Artificial Sequence
  Synthetic
SEVDEAVKNNEEDAKESRRVVEEAVKRDEDIARDIERAAREVVERDKEIVDEVRRGVKDEKKLREVVTLSKKIVDETKEIADRVLELSKRIVKETRDIAKRVLKLNDDSVKDVRRIAREGRSKETKDLLDENSKRSNEISREVKKLCMSCAQESKKIVDEVAKALEDTV

SEQ ID NO: 27437 - protein, 170 aa, Artificial Sequence
  Synthetic
SEVDEAVKNNEEDAKESRRVVEEAVKRDEDIARDIERAAREVVERDKEIVDEVRRGVKDEKKLREVVTLSKKIVDETKEIADRVLELSKRIVKETRDIAKRVLKLNDDSVKDVRRIAREGRSKETKDLLDENSKRSNEISREVKKDLEMSCAQESKIVDEVAKALEDTVD

SEQ ID NO: 27438 - protein, 173 aa, Artificial Sequence
  Synthetic
SEVDEAVKNNEEDAKESRRVVEEAVKRDEDIARDIERAAREVVERDKEIVDEVRRGVKDEKKLREVVTLSKKIVDETKEIADRVLELSKRIVKETRDIAKRVLKLNDDSVKDVRRIAREGRSKETKDLLDENSKRSNEISREVKKDLERLVMSCAQESDEVAKALEDTVDKNR

SEQ ID NO: 27439 - protein, 177 aa, Artificial Sequence
  Synthetic
SEVDEAVKNNEEDAKESRRVVEEAVKRDEDIARDIERAAREVVERDKEIVDEVRRGVKDEKKLREVVTLSKKIVDETKEIADRVLELSKRIVKETRDIAKRVLKLNDDSVKDVRRIAREGRSKETKDLLDENSKRSNEISREVKKDLERTVRELKMSCAQESKALEDTVDKNRRIVE

SEQ ID NO: 27440 - protein, 170 aa, Artificial Sequence
  Synthetic
SEAEELLKRLEDRAEEILRRLEEILRTSRKLAEDVLRELEKLLRESERRIREVLEELRGIKDKKELEDVIREVEKELDESLERSRELLKDVLKKLDDNLKESERLVEDIDRELAKILEDLKKAGVPKEVVDEIKRIVDEVRERLKRLVMSCAQESEDARRALEKIVKENE

SEQ ID NO: 27441 - protein, 173 aa, Artificial Sequence
  Synthetic
SEAEELLKRLEDRAEEILRRLEEILRTSRKLAEDVLRELEKLLRESERRIREVLEELRGIKDKKELEDVIREVEKELDESLERSRELLKDVLKKLDDNLKESERLVEDIDRELAKILEDLKKAGVPKEVVDEIKRIVDEVRERLKRIVDLTMSCAQESRRALEKIVKENEEIL

SEQ ID NO: 27442 - protein, 174 aa, Artificial Sequence
  Synthetic
SEAEELLKRLEDRAEEILRRLEEILRTSRKLAEDVLRELEKLLRESERRIREVLEELRGIKDKKELEDVIREVEKELDESLERSRELLKDVLKKLDDNLKESERLVEDIDRELAKILEDLKKAGVPKEVVDEIKRIVDEVRERLKRIVDELRMSCAQESRALEKIVKENEEILR

SEQ ID NO: 27443 - protein, 177 aa, Artificial Sequence
  Synthetic
SEAEELLKRLEDRAEEILRRLEEILRTSRKLAEDVLRELEKLLRESERRIREVLEELRGIKDKKELEDVIREVEKELDESLERSRELLKDVLKKLDDNLKESERLVEDIDRELAKILEDLKKAGVPKEVVDEIKRIVDEVRERLKRIVDENAKLTMSCAQESEKIVKENEEILRRLK

SEQ ID NO: 27444 - protein, 185 aa, Artificial Sequence
  Synthetic
SEAEELLKRLEDRAEEILRRLEEILRTSRKLAEDVLRELEKLLRESERRIREVLEELRGIKDKKELEDVIREVEKELDESLERSRELLKDVLKKLDDNLKESERLVEDIDRELAKILEDLKKAGVPKEVVDEIKRIVDEVRERLKRIVDENAKIVEDARRALEMSCAQESEILRRLKKELRELRK

SEQ ID NO: 27445 - protein, 160 aa, Artificial Sequence
  Synthetic
SRAETVLKEVTDKIKKLADSSDELLRRNKENIDELKKSSEELLRRLTKAIEEIEKGSVDEETLEELIRRVEAELEAHHRELEKNSREDEKRNRDHHAKLEEEMRRVEERLEREGIDDEVVKRVRDLLDTVRRRNEKLMMSCAQESDKLRRDNEDVIRRVE

SEQ ID NO: 27446 - protein, 167 aa, Artificial Sequence
  Synthetic
SRAETVLKEVTDKIKKLADSSDELLRRNKENIDELKKSSEELLRRLTKAIEEIEKGSVDEETLEELIRRVEAELEAHHRELEKNSREDEKRNRDHHAKLEEEMRRVEERLEREGIDDEVVKRVRDLLDTVRRRNEKVNEDVKRLNMSCAQESEDVIRRVEKLLRELE

SEQ ID NO: 27447 - protein, 171 aa, Artificial Sequence
  Synthetic
SRAETVLKEVTDKIKKLADSSDELLRRNKENIDELKKSSEELLRRLTKAIEEIEKGSVDEETLEELIRRVEAELEAHHRELEKNSREDEKRNRDHHAKLEEEMRRVEERLEREGIDDEVVKRVRDLLDTVRRRNEKVNEDVKRMNDKLRMSCAQESRRVEKLLRELEEKRR

SEQ ID NO: 27448 - protein, 160 aa, Artificial Sequence
  Synthetic
SRAETVLKEVTDKIKKLADSSDELLRRNKENIDELKKSSEELLRRLTKAIEEIEKGSVDEETLEELIRRVEAELEAHHRELEKNSREDEKRNRDHHAKLEEEMRRVEERLEREGIDDEVVKRVRDLLDTVRRRNEKLVMSCAQESDKLRRDNEDVIRRVE

SEQ ID NO: 27449 - protein, 167 aa, Artificial Sequence; identical to SEQ ID NO: 27446
  Synthetic

SEQ ID NO: 27450 - protein, 171 aa, Artificial Sequence; identical to SEQ ID NO: 27447
  Synthetic

SEQ ID NO: 27451 - protein, 162 aa, Artificial Sequence
  Synthetic
DEVRELLERNRRLLEEIKKTVKDLIRANEELLKRIEDDAKRLIDRNEELLDELEKGLSDDETIREAKERLKASLEDVKRRVEEVKRLLEKSLEEVETIIREAEKRNRDSLREMERRGSSEELEELRRVVEESDETIKRLLMSCAQESDRSLDRIRKLLEDVR

SEQ ID NO: 27452 - protein, 166 aa, Artificial Sequence
  Synthetic
DEVRELLERNRRLLEEIKKTVKDLIRANEELLKRIEDDAKRLIDRNEELLDELEKGLSDDETIREAKERLKASLEDVKRRVEEVKRLLEKSLEEVETIIREAEKRNRDSLREMERRGSSEELEELRRVVEESDETIKRLLEELIMSCAQESDRIRKLLEDVRRSVE

SEQ ID NO: 27453 - protein, 169 aa, Artificial Sequence
  Synthetic
DEVRELLERNRRLLEEIKKTVKDLIRANEELLKRIEDDAKRLIDRNEELLDELEKGLSDDETIREAKERLKASLEDVKRRVEEVKRLLEKSLEEVETIIREAEKRNRDSLREMERRGSSEELEELRRVVEESDETIKRLLEEAKELVMSCAQESRKLLEDVRRSVERSA

SEQ ID NO: 27454 - protein, 173 aa, Artificial Sequence
  Synthetic
DEVRELLERNRRLLEEIKKTVKDLIRANEELLKRIEDDAKRLIDRNEELLDELEKGLSDDETIREAKERLKASLEDVKRRVEEVKRLLEKSLEEVETIIREAEKRNRDSLREMERRGSSEELEELRRVVEESDETIKRLLEEAKESVDRLLMSCAQESEDVRRSVERSAKRID

SEQ ID NO: 27455 - protein, 165 aa, Artificial Sequence
  Synthetic
STEEVLDEIRKLHKTLTEDIKRVLREIEELHRRTIEENKEVLDKIAEDYKRVIDDVRTKDTPNVEKLLKDLEKSAKENIEHNERTLREDDRVLKEIRRRATELLKANEEMLRRIEEVARKGGVDAEELLRESKEAIKEVKRLLMSCAQESKRVVDETRKLSEENL

SEQ ID NO: 27456 - protein, 169 aa, Artificial Sequence
  Synthetic
STEEVLDEIRKLHKTLTEDIKRVLREIEELHRRTIEENKEVLDKIAEDYKRVIDDVRTKDTPNVEKLLKDLEKSAKENIEHNERTLREDDRVLKEIRRRATELLKANEEMLRRIEEVARKGGVDAEELLRESKEAIKEVKRVLEELKMSCAQESDETRKLSEENLEHSE

SEQ ID NO: 27457 - protein, 173 aa, Artificial Sequence
  Synthetic
STEEVLDEIRKLHKTLTEDIKRVLREIEELHRRTIEENKEVLDKIAEDYKRVIDDVRTKDTPNVEKLLKDLEKSAKENIEHNERTLREDDRVLKEIRRRATELLKANEEMLRRIEEVARKGGVDAEELLRESKEAIKEVKRVLEELRKELEMSCAQESKLSEENLEHSERVLR

SEQ ID NO: 27458 - protein, 176 aa, Artificial Sequence
  Synthetic
STEEVLDEIRKLHKTLTEDIKRVLREIEELHRRTIEENKEVLDKIAEDYKRVIDDVRTKDTPNVEKLLKDLEKSAKENIEHNERTLREDDRVLKEIRRRATELLKANEEMLRRIEEVARKGGVDAEELLRESKEAIKEVKRVLEELRKESKRLTMSCAQESEENLEHSERVLRKVE

SEQ ID NO: 27459 - protein, 180 aa, Artificial Sequence
  Synthetic
STEEVLDEIRKLHKTLTEDIKRVLREIEELHRRTIEENKEVLDKIAEDYKRVIDDVRTKDTPNVEKLLKDLEKSAKENIEHNERTLREDDRVLKEIRRRATELLKANEEMLRRIEEVARKGGVDAEELLRESKEAIKEVKRVLEELRKESKRVVDELRMSCAQESEHSERVLRKVEEDLR

SEQ ID NO: 27460 - protein, 173 aa, Artificial Sequence
  Synthetic
SEIEKILKEIEDLARRDEEVSKKIVEDIRRLAKEVEDTSRDIVRKIEELAKRVLDRLRKDGSKEELEKEVREVVKTLEELVKDNHRLIRRAVEEMKRLVEENHRHSREVVKELEDLVRELRKGSGSEDSERLVREVEDLVRRLVRRSEKLDMSCAQESEELVRRMEESNDRVR

SEQ ID NO: 27461 - protein, 177 aa, Artificial Sequence
  Synthetic
SEIEKILKEIEDLARRDEEVSKKIVEDIRRLAKEVEDTSRDIVRKIEELAKRVLDRLRKDGSKEELEKEVREVVKTLEELVKDNHRLIRRAVEEMKRLVEENHRHSREVVKELEDLVRELRKGSGSEDSERLVREVEDLVRRLVRRSEKSNEELKMSCAQESRRMEESNDRVRDLVR

SEQ ID NO: 27462 - protein, 181 aa, Artificial Sequence
  Synthetic
SEIEKILKEIEDLARRDEEVSKKIVEDIRRLAKEVEDTSRDIVRKIEELAKRVLDRLRKDGSKEELEKEVREVVKTLEELVKDNHRLIRRAVEEMKRLVEENHRHSREVVKELEDLVRELRKGSGSEDSERLVREVEDLVRRLVRRSEKSNEEVKRTLEMSCAQESESNDRVRDLVRRLVE

SEQ ID NO: 27463 - protein, 184 aa, Artificial Sequence
  Synthetic
SEIEKILKEIEDLARRDEEVSKKIVEDIRRLAKEVEDTSRDIVRKIEELAKRVLDRLRKDGSKEELEKEVREVVKTLEELVKDNHRLIRRAVEEMKRLVEENHRHSREVVKELEDLVRELRKGSGSEDSERLVREVEDLVRRLVRRSEKSNEEVKRTVEELVMSCAQESDRVRDLVRRLVEELK

SEQ ID NO: 27464 - protein, 188 aa, Artificial Sequence
  Synthetic
SEIEKILKEIEDLARRDEEVSKKIVEDIRRLAKEVEDTSRDIVRKIEELAKRVLDRLRKDGSKEELEKEVREVVKTLEELVKDNHRLIRRAVEEMKRLVEENHRHSREVVKELEDLVRELRKGSGSEDSERLVREVEDLVRRLVRRSEKSNEEVKRTVEELVRRLLMSCAQESDLVRRLVEELKRAVD

SEQ ID NO: 27465 - protein, 163 aa, Artificial Sequence
  Synthetic
SEAEKAKETIDRLADRVRKLLEEIKRSLDDSRRKSKETVEENEKTLDRMRKEVDAAKRGSVSEEELERLIRKLKKTLDELRRRHEKLVEDLRRNLERIKRRLEELTREMRETLERLAREGLDEEVLRTLEEIIRRLTKELIMSCAQESRELRRLEEENKRVID

SEQ ID NO: 27466 - protein, 170 aa, Artificial Sequence
  Synthetic
SEAEKAKETIDRLADRVRKLLEEIKRSLDDSRRKSKETVEENEKTLDRMRKEVDAAKRGSVSEEELERLIRKLKKTLDELRRRHEKLVEDLRRNLERIKRRLEELTREMRETLERLAREGLDEEVLRTLEEIIRRLTKELEDVLRELKMSCAQESEENKRVIDKTEEEIR

SEQ ID NO: 27467 - protein, 163 aa, Artificial Sequence; identical to SEQ ID NO: 27465
  Synthetic

SEQ ID NO: 27468 - protein, 166 aa, Artificial Sequence
  Synthetic
SEAEKAKETIDRLADRVRKLLEEIKRSLDDSRRKSKETVEENEKTLDRMRKEVDAAKRGSVSEEELERLIRKLKKTLDELRRRHEKLVEDLRRNLERIKRRLEELTREMRETLERLAREGLDEEVLRTLEEIIRRLTKELEDLLMSCAQESRRLEEENKRVIDKTE

SEQ ID NO: 27469 - protein, 170 aa, Artificial Sequence; identical to SEQ ID NO: 27466
  Synthetic

SEQ ID NO: 27470 - protein, 164 aa, Artificial Sequence
  Synthetic
SEVEELIKRLAKVLKELVDKVRKVIEDTKELLERLKRRSEDHIRKLREVLKEAKDQPIDDEELKEILDRLRKTLEELEEELKKALEDDREEAKRLVDDARRVLKELEEEVREIRERRGESEELDRRIEKVLKEIEEKIRELIMSCAQESREVEELLKRLIDENR

SEQ ID NO: 27471 - protein, 167 aa, Artificial Sequence
  Synthetic
SEVEELIKRLAKVLKELVDKVRKVIEDTKELLERLKRRSEDHIRKLREVLKEAKDQPIDDEELKEILDRLRKTLEELEEELKKALEDDREEAKRLVDDARRVLKELEEEVREIRERRGESEELDRRIEKVLKEIEEKIREVIKLLMSCAQESEELLKRLIDENRKVL

SEQ ID NO: 27472 - protein, 168 aa, Artificial Sequence
  Synthetic
SEVEELIKRLAKVLKELVDKVRKVIEDTKELLERLKRRSEDHIRKLREVLKEAKDQPIDDEELKEILDRLRKTLEELEEELKKALEDDREEAKRLVDDARRVLKELEEEVREIRERRGESEELDRRIEKVLKEIEEKIREVIKELEMSCAQESELLKRLIDENRKVLD

SEQ ID NO: 27473 - protein, 175 aa, Artificial Sequence
  Synthetic
SEVEELIKRLAKVLKELVDKVRKVIEDTKELLERLKRRSEDHIRKLREVLKEAKDQPIDDEELKEILDRLRKTLEELEEELKKALEDDREEAKRLVDDARRVLKELEEEVREIRERRGESEELDRRIEKVLKEIEEKIREVIKEWERVHRELEMSCAQESDENRKVLDEIRKLLE

SEQ ID NO: 27474 - protein, 164 aa, Artificial Sequence; identical to SEQ ID NO: 27470
  Synthetic

SEQ ID NO: 27475 - protein, 167 aa, Artificial Sequence; identical to SEQ ID NO: 27471
  Synthetic

SEQ ID NO: 27476 - protein, 168 aa, Artificial Sequence
  Synthetic
SEVEELIKRLAKVLKELVDKVRKVIEDTKELLERLKRRSEDHIRKLREVLKEAKDQPIDDEELKEILDRLRKTLEELEEELKKALEDDREEAKRLVDDARRVLKELEEEVREIRERRGESEELDRRIEKVLKEIEEKIREVIKELKMSCAQESELLKRLIDENRKVLD

SEQ ID NO: 27477 - protein, 175 aa, Artificial Sequence; identical to SEQ ID NO: 27473
  Synthetic

SEQ ID NO: 27478 - protein, 167 aa, Artificial Sequence
  Synthetic
SELEEIEKKVRELTKRHRELVERVRKTVKELIETNRRLLETLTERIKRVLEEVRDLERRGEPKEDLKARLEDIIRRLAEDIERVKRETDKLLEELARIIEEVEKEMRETNKELDKEIKDGGLDDKALEEAKRVLAENNEVIKDLIMSCAQESKELEKSVRESEERLR

SEQ ID NO: 27479 - protein, 171 aa, Artificial Sequence
  Synthetic
SELEEIEKKVRELTKRHRELVERVRKTVKELIETNRRLLETLTERIKRVLEEVRDLERRGEPKEDLKARLEDIIRRLAEDIERVKRETDKLLEELARIIEEVEKEMRETNKELDKEIKDGGLDDKALEEAKRVLAENNEVIKDIKRALEMSCAQESKSVRESEERLRRLLE

SEQ ID NO: 27480 - protein, 174 aa, Artificial Sequence
  Synthetic
SELEEIEKKVRELTKRHRELVERVRKTVKELIETNRRLLETLTERIKRVLEEVRDLERRGEPKEDLKARLEDIIRRLAEDIERVKRETDKLLEELARIIEEVEKEMRETNKELDKEIKDGGLDDKALEEAKRVLAENNEVIKDIKRALDELGMSCAQESRESEERLRRLLEEVK

SEQ ID NO: 27481 - protein, 177 aa, Artificial Sequence
  Synthetic
SELEEIEKKVRELTKRHRELVERVRKTVKELIETNRRLLETLTERIKRVLEEVRDLERRGEPKEDLKARLEDIIRRLAEDIERVKRETDKLLEELARIIEEVEKEMRETNKELDKEIKDGGLDDKALEEAKRVLAENNEVIKDIKRALDELLKLAMSCAQESEERLRRLLEEVKRVI

SEQ ID NO: 27482 - protein, 178 aa, Artificial Sequence
  Synthetic
SELEEIEKKVRELTKRHRELVERVRKTVKELIETNRRLLETLTERIKRVLEEVRDLERRGEPKEDLKARLEDIIRRLAEDIERVKRETDKLLEELARIIEEVEKEMRETNKELDKEIKDGGLDDKALEEAKRVLAENNEVIKDIKRALDELLKELEMSCAQESERLRRLLEEVKRVIE

SEQ ID NO: 27483 - protein, 181 aa, Artificial Sequence
  Synthetic
SELEEIEKKVRELTKRHRELVERVRKTVKELIETNRRLLETLTERIKRVLEEVRDLERRGEPKEDLKARLEDIIRRLAEDIERVKRETDKLLEELARIIEEVEKEMRETNKELDKEIKDGGLDDKALEEAKRVLAENNEVIKDIKRALDELLKELEKLAMSCAQESRRLLEEVKRVIEEVA

SEQ ID NO: 27484 - protein, 171 aa, Artificial Sequence
  Synthetic
SEAERLEARARELLRANEELMDDLRAKAEELLKRNDRLVKEIEKKVREVLAAIEELKRRGEPKEEVARKIEEILRRLEETLRRIKEESDRLDEELKRELERVKRESEELDRELRKLIEDVERRGSGSKRLEELLRRLNEEHKRISDELEMSCAQESEAHRELSRRLEEELE

SEQ ID NO: 27485 - protein, 174 aa, Artificial Sequence
  Synthetic
SEAERLEARARELLRANEELMDDLRAKAEELLKRNDRLVKEIEKKVREVLAAIEELKRRGEPKEEVARKIEEILRRLEETLRRIKEESDRLDEELKRELERVKRESEELDRELRKLIEDVERRGSGSKRLEELLRRLNEEHKRISDELRKLGMSCAQESRELSRRLEEELERLL

SEQ ID NO: 27486 - protein, 175 aa, Artificial Sequence
  Synthetic
SEAERLEARARELLRANEELMDDLRAKAEELLKRNDRLVKEIEKKVREVLAAIEELKRRGEPKEEVARKIEEILRRLEETLRRIKEESDRLDEELKRELERVKRESEELDRELRKLIEDVERRGSGSKRLEELLRRLNEEHKRISDELRKLLDMSCAQESELSRRLEEELERLLR

SEQ ID NO: 27487 - protein, 177 aa, Artificial Sequence
  Synthetic
SEAERLEARARELLRANEELMDDLRAKAEELLKRNDRLVKEIEKKVREVLAAIEELKRRGEPKEEVARKIEEILRRLEETLRRIKEESDRLDEELKRELERVKRESEELDRELRKLIEDVERRGSGSKRLEELLRRLNEEHKRISDELRKLLDLAMSCAQESSRRLEEELERLLREI

SEQ ID NO: 27488 - protein, 178 aa, Artificial Sequence
  Synthetic
SEAERLEARARELLRANEELMDDLRAKAEELLKRNDRLVKEIEKKVREVLAAIEELKRRGEPKEEVARKIEEILRRLEETLRRIKEESDRLDEELKRELERVKRESEELDRELRKLIEDVERRGSGSKRLEELLRRLNEEHKRISDELRKLLDELLMSCAQESRRLEEELERLLREIE

SEQ ID NO: 27489 - protein, 181 aa, Artificial Sequence
  Synthetic
SEAERLEARARELLRANEELMDDLRAKAEELLKRNDRLVKEIEKKVREVLAAIEELKRRGEPKEEVARKIEEILRRLEETLRRIKEESDRLDEELKRELERVKRESEELDRELRKLIEDVERRGSGSKRLEELLRRLNEEHKRISDELRKLLDEALELSMSCAQESEEELERLLREIERLV

SEQ ID NO: 27490 - protein, 182 aa, Artificial Sequence
  Synthetic
SEAERLEARARELLRANEELMDDLRAKAEELLKRNDRLVKEIEKKVREVLAAIEELKRRGEPKEEVARKIEEILRRLEETLRRIKEESDRLDEELKRELERVKRESEELDRELRKLIEDVERRGSGSKRLEELLRRLNEEHKRISDELRKLLDEALEALKMSCAQESEELERLLREIERLVE

SEQ ID NO: 27491 - protein, 185 aa, Artificial Sequence
  Synthetic
SEAERLEARARELLRANEELMDDLRAKAEELLKRNDRLVKEIEKKVREVLAAIEELKRRGEPKEEVARKIEEILRRLEETLRRIKEESDRLDEELKRELERVKRESEELDRELRKLIEDVERRGSGSKRLEELLRRLNEEHKRISDELRKLLDEALEAHRELVMSCAQESERLLREIERLVEEVT

SEQ ID NO: 27492 - protein, 165 aa, Artificial Sequence
  Synthetic
SVDEVLKEIEDALRRLKEEVERVLKENEDELRRLEEEVRRVLKEDEELLESLKRGVGESDEVDRVVDEIAKLSAEILEKVKKVVKEIRDSLETVKRRVDDVVRRLKELLDEIKRGSDEKAIRDVAKEIRDRLKELEEEIEELTMSCAQESADVEEEIRRVHEKTR

SEQ ID NO: 27493 - protein, 169 aa, Artificial Sequence
  Synthetic
SVDEVLKEIEDALRRLKEEVERVLKENEDELRRLEEEVRRVLKEDEELLESLKRGVGESDEVDRVVDEIAKLSAEILEKVKKVVKEIRDSLETVKRRVDDVVRRLKELLDEIKRGSDEKAIRDVAKEIRDRLKELEEEIEEVTRRLLMSCAQESEEIRRVHEKTRRLLE

SEQ ID NO: 27494 - protein, 172 aa, Artificial Sequence
  Synthetic
SVDEVLKEIEDALRRLKEEVERVLKENEDELRRLEEEVRRVLKEDEELLESLKRGVGESDEVDRVVDEIAKLSAEILEKVKKVVKEIRDSLETVKRRVDDVVRRLKELLDEIKRGSDEKAIRDVAKEIRDRLKELEEEIEEVTRRNLKLLMSCAQESRRVHEKTRRLLETVL

SEQ ID NO: 27495 - protein, 176 aa, Artificial Sequence
  Synthetic
SVDEVLKEIEDALRRLKEEVERVLKENEDELRRLEEEVRRVLKEDEELLESLKRGVGESDEVDRVVDEIAKLSAEILEKVKKVVKEIRDSLETVKRRVDDVVRRLKELLDEIKRGSDEKAIRDVAKEIRDRLKELEEEIEEVTRRNLKLLADLEMSCAQESEKTRRLLETVLRRAT

SEQ ID NO: 27496 - protein, 169 aa, Artificial Sequence
  Synthetic
DDLERAREEVADLIRKHEEKTRRILEESRRLNERHRELSARILDEIRKLAERIEELIKRERGKDELRRKVEDLEARVEDLIRRLEEHLRRVHDKDRRLIEDLRRHLKRVVEELKRLIDELRRGVPKEELDRIEEELKRLIDTLRELVMSCAQESRDSNRDLKRTNDEIA

SEQ ID NO: 27497 - protein, 173 aa, Artificial Sequence
  Synthetic
DDLERAREEVADLIRKHEEKTRRILEESRRLNERHRELSARILDEIRKLAERIEELIKRERGKDELRRKVEDLEARVEDLIRRLEEHLRRVHDKDRRLIEDLRRHLKRVVEELKRLIDELRRGVPKEELDRIEEELKRLIDTLREKNRELAMSCAQESRDLKRTNDEIAKEVR

SEQ ID NO: 27498 - protein, 180 aa, Artificial Sequence
  Synthetic
DDLERAREEVADLIRKHEEKTRRILEESRRLNERHRELSARILDEIRKLAERIEELIKRERGKDELRRKVEDLEARVEDLIRRLEEHLRRVHDKDRRLIEDLRRHLKRVVEELKRLIDELRRGVPKEELDRIEEELKRLIDTLREKNREVEKRARDLVMSCAQESDEIAKEVRELIKKLR

SEQ ID NO: 27499 - protein, 184 aa, Artificial Sequence
  Synthetic
DDLERAREEVADLIRKHEEKTRRILEESRRLNERHRELSARILDEIRKLAERIEELIKRERGKDELRRKVEDLEARVEDLIRRLEEHLRRVHDKDRRLIEDLRRHLKRVVEELKRLIDELRRGVPKEELDRIEEELKRLIDTLREKNREVEKRARDSNRDLAMSCAQESKEVRELIKKLREDLK

SEQ ID NO: 27500 - protein, 159 aa, Artificial Sequence
  Synthetic
KEVEDAVKELEDLLRANEDKTRSIVEDMRASNKDLEDHSRASEEEVRKLLDDLRRAGVPRDSLKRLAEDVERVTRESRELLERVHRADRELIERLKESNERLRRAIEEIRKAIKGGSDIKTLLDRVRKLAEEDAELAMSCAQESEELNERVRRVDKKLL

SEQ ID NO: 27501 - protein, 163 aa, Artificial Sequence
  Synthetic
KEVEDAVKELEDLLRANEDKTRSIVEDMRASNKDLEDHSRASEEEVRKLLDDLRRAGVPRDSLKRLAEDVERVTRESRELLERVHRADRELIERLKESNERLRRAIEEIRKAIKGGSDIKTLLDRVRKLAEEDAERLDRLKMSCAQESERVRRVDKKLLEEIR

SEQ ID NO: 27502 - protein, 166 aa, Artificial Sequence
  Synthetic
KEVEDAVKELEDLLRANEDKTRSIVEDMRASNKDLEDHSRASEEEVRKLLDDLRRAGVPRDSLKRLAEDVERVTRESRELLERVHRADRELIERLKESNERLRRAIEEIRKAIKGGSDIKTLLDRVRKLAEEDAERLDRLRRLAMSCAQESRRVDKKLLEEIRRKA

SEQ ID NO: 27503 - protein, 167 aa, Artificial Sequence
  Synthetic
KEVEDAVKELEDLLRANEDKTRSIVEDMRASNKDLEDHSRASEEEVRKLLDDLRRAGVPRDSLKRLAEDVERVTRESRELLERVHRADRELIERLKESNERLRRAIEEIRKAIKGGSDIKTLLDRVRKLAEEDAERLDRLRRELEMSCAQESRVDKKLLEEIRRKAK

SEQ ID NO: 27504 - protein, 170 aa, Artificial Sequence
  Synthetic
KEVEDAVKELEDLLRANEDKTRSIVEDMRASNKDLEDHSRASEEEVRKLLDDLRRAGVPRDSLKRLAEDVERVTRESRELLERVHRADRELIERLKESNERLRRAIEEIRKAIKGGSDIKTLLDRVRKLAEEDAERLDRLRRESEELAMSCAQESKKLLEEIRRKAKKVE

SEQ ID NO: 27505 - protein, 174 aa, Artificial Sequence
  Synthetic
KEVEDAVKELEDLLRANEDKTRSIVEDMRASNKDLEDHSRASEEEVRKLLDDLRRAGVPRDSLKRLAEDVERVTRESRELLERVHRADRELIERLKESNERLRRAIEEIRKAIKGGSDIKTLLDRVRKLAEEDAERLDRLRRESEELNERLRMSCAQESEEIRRKAKKVEDDTR

SEQ ID NO: 27506 - protein, 159 aa, Artificial Sequence
  Synthetic
KEVEDAVKELEDLLRANEDKTRSIVEDMRASNKDLEDHSRASEEEVRKLLDDLRRAGVPRDSLKRLAEDVERVTRESRELLERVHRADRELIERLKESNERLRRAIEEIRKAIKGGSDIKTLLDRVRKLAEEDAELLMSCAQESEELNERVRRVDKKLL

SEQ ID NO: 27507 - protein, 163 aa, Artificial Sequence
  Synthetic
KEVEDAVKELEDLLRANEDKTRSIVEDMRASNKDLEDHSRASEEEVRKLLDDLRRAGVPRDSLKRLAEDVERVTRESRELLERVHRADRELIERLKESNERLRRAIEEIRKAIKGGSDIKTLLDRVRKLAEEDAERLDRLAMSCAQESERVRRVDKKLLEEIR

SEQ ID NO: 27508 - protein, 166 aa, Artificial Sequence; identical to SEQ ID NO: 27502
  Synthetic

SEQ ID NO: 27509 - protein, 170 aa, Artificial Sequence; identical to SEQ ID NO: 27504
  Synthetic

SEQ ID NO: 27510 - protein, 174 aa, Artificial Sequence; identical to SEQ ID NO: 27505
  Synthetic

SEQ ID NO: 27511 - protein, 163 aa, Artificial Sequence
  Synthetic
DEEEDLERAIKKLLDENRELLKRIAEELRRLLEELRRLTEESADRLRRLLKELKDRGVPEEDLADVAEKVKKVLKESEDSNADVARKLEKLLRDLERSTERLEREARKVRKLLRGGKDAETLLRELEKLSRDNKELLKKLLMSCAQESKEDKERNIELSERLR

SEQ ID NO: 27512 - protein, 170 aa, Artificial Sequence
  Synthetic
DEEEDLERAIKKLLDENRELLKRIAEELRRLLEELRRLTEESADRLRRLLKELKDRGVPEEDLADVAEKVKKVLKESEDSNADVARKLEKLLRDLERSTERLEREARKVRKLLRGGKDAETLLRELEKLSRDNKELLKKIEKEIRDLIMSCAQESIELSERLRKLVEELK

SEQ ID NO: 27513 - protein, 174 aa, Artificial Sequence
  Synthetic
DEEEDLERAIKKLLDENRELLKRIAEELRRLLEELRRLTEESADRLRRLLKELKDRGVPEEDLADVAEKVKKVLKESEDSNADVARKLEKLLRDLERSTERLEREARKVRKLLRGGKDAETLLRELEKLSRDNKELLKKIEKEIRDLIKELKMSCAQESERLRKLVEELKKKAT

SEQ ID NO: 27514 - protein, 163 aa, Artificial Sequence; identical to SEQ ID NO: 27511
  Synthetic

SEQ ID NO: 27515 - protein, 170 aa, Artificial Sequence
  Synthetic
DEEEDLERAIKKLLDENRELLKRIAEELRRLLEELRRLTEESADRLRRLLKELKDRGVPEEDLADVAEKVKKVLKESEDSNADVARKLEKLLRDLERSTERLEREARKVRKLLRGGKDAETLLRELEKLSRDNKELLKKIEKEIRDLVMSCAQESIELSERLRKLVEELK

SEQ ID NO: 27516 - protein, 174 aa, Artificial Sequence; identical to SEQ ID NO: 27513
  Synthetic

SEQ ID NO: 27517 - protein, 163 aa, Artificial Sequence
  Synthetic
DDAERILREMERLLEENKEISDEIAKELKRLLDENRKLSEDVVKALEDLLRDLERRSGVSEEVLKRVREVLERIKRELDRSDDELRKVAERILRDAERSNDELRKVIEEIEEELRGSRDKDTLRELARSIRKLSAENKELLMSCAQESKKLSDENKERIKKLL

SEQ ID NO: 27518 - protein, 167 aa, Artificial Sequence
  Synthetic
DDAERILREMERLLEENKEISDEIAKELKRLLDENRKLSEDVVKALEDLLRDLERRSGVSEEVLKRVREVLERIKRELDRSDDELRKVAERILRDAERSNDELRKVIEEIEEELRGSRDKDTLRELARSIRKLSAENKERLKELAMSCAQESDENKERIKKLLSDAE

SEQ ID NO: 27519 - protein, 170 aa, Artificial Sequence
  Synthetic
DDAERILREMERLLEENKEISDEIAKELKRLLDENRKLSEDVVKALEDLLRDLERRSGVSEEVLKRVREVLERIKRELDRSDDELRKVAERILRDAERSNDELRKVIEEIEEELRGSRDKDTLRELARSIRKLSAENKERLKELLRLAMSCAQESKERIKKLLSDAEKII

SEQ ID NO: 27520 - protein, 171 aa, Artificial Sequence
  Synthetic
DDAERILREMERLLEENKEISDEIAKELKRLLDENRKLSEDVVKALEDLLRDLERRSGVSEEVLKRVREVLERIKRELDRSDDELRKVAERILRDAERSNDELRKVIEEIEEELRGSRDKDTLRELARSIRKLSAENKERLKELLRELKMSCAQESERIKKLLSDAEKIIE

SEQ ID NO: 27521 - protein, 174 aa, Artificial Sequence
  Synthetic
DDAERILREMERLLEENKEISDEIAKELKRLLDENRKLSEDVVKALEDLLRDLERRSGVSEEVLKRVREVLERIKRELDRSDDELRKVAERILRDAERSNDELRKVIEEIEEELRGSRDKDTLRELARSIRKLSAENKERLKELLRELKKLAMSCAQESKKLLSDAEKIIEDVA

SEQ ID NO: 27522 - protein, 178 aa, Artificial Sequence
  Synthetic
DDAERILREMERLLEENKEISDEIAKELKRLLDENRKLSEDVVKALEDLLRDLERRSGVSEEVLKRVREVLERIKRELDRSDDELRKVAERILRDAERSNDELRKVIEEIEEELRGSRDKDTLRELARSIRKLSAENKERLKELLRELKKLSDELKMSCAQESSDAEKIIEDVARRAK

SEQ ID NO: 27523 - protein, 162 aa, Artificial Sequence
  Synthetic
SSEERLRAVIEDLKRLAEESRKRHKELIDELAKAVERIERRHKKLLDEIKAVVDDIRRGVSEELLKRIEEVLDEIRKELEENIKRIRKVLDELRRTSEENIARIEKVLRELEDLVRKGGSDADTIIEEVKRVLEELARLTMSCAQESRDAIEELERSSEELA

SEQ ID NO: 27524 - protein, 166 aa, Artificial Sequence
  Synthetic
SSEERLRAVIEDLKRLAEESRKRHKELIDELAKAVERIERRHKKLLDEIKAVVDDIRRGVSEELLKRIEEVLDEIRKELEENIKRIRKVLDELRRTSEENIARIEKVLRELEDLVRKGGSDADTIIEEVKRVLEELARSTEELAMSCAQESEELERSSEELARRIK

SEQ ID NO: 27525 - protein, 169 aa, Artificial Sequence
  Synthetic
SSEERLRAVIEDLKRLAEESRKRHKELIDELAKAVERIERRHKKLLDEIKAVVDDIRRGVSEELLKRIEEVLDEIRKELEENIKRIRKVLDELRRTSEENIARIEKVLRELEDLVRKGGSDADTIIEEVKRVLEELARSTEEVEKLVMSCAQESERSSEELARRIKEVL

SEQ ID NO: 27526 - protein, 170 aa, Artificial Sequence
  Synthetic
SSEERLRAVIEDLKRLAEESRKRHKELIDELAKAVERIERRHKKLLDEIKAVVDDIRRGVSEELLKRIEEVLDEIRKELEENIKRIRKVLDELRRTSEENIARIEKVLRELEDLVRKGGSDADTIIEEVKRVLEELARSTEEVEKRLRMSCAQESRSSEELARRIKEVLK

SEQ ID NO: 27527 - protein, 173 aa, Artificial Sequence
  Synthetic
SSEERLRAVIEDLKRLAEESRKRHKELIDELAKAVERIERRHKKLLDEIKAVVDDIRRGVSEELLKRIEEVLDEIRKELEENIKRIRKVLDELRRTSEENIARIEKVLRELEDLVRKGGSDADTIIEEVKRVLEELARSTEEVEKRVRDLIMSCAQESEELARRIKEVLKRLE

SEQ ID NO: 27528 - protein, 163 aa, Artificial Sequence
  Synthetic
DEARELVKELEDLIREITKTVRRLLEESEELIKRIDDAVDDLRRADEDLNREIKEEIEKGKSKESLEALIERLKESLERVKRTIEKLIRDLERLNEKLRRDVESLVAELEKILSKIKRGGLDERILRELEERVKELEKELRMSCAQESDETDKLREKAERILE

SEQ ID NO: 27529 - protein, 166 aa, Artificial Sequence
  Synthetic
DEARELVKELEDLIREITKTVRRLLEESEELIKRIDDAVDDLRRADEDLNREIKEEIEKGKSKESLEALIERLKESLERVKRTIEKLIRDLERLNEKLRRDVESLVAELEKILSKIKRGGLDERILRELEERVKELEKEARELLMSCAQESDKLREKAERILEDLE

SEQ ID NO: 27530 - protein, 170 aa, Artificial Sequence
  Synthetic
DEARELVKELEDLIREITKTVRRLLEESEELIKRIDDAVDDLRRADEDLNREIKEEIEKGKSKESLEALIERLKESLERVKRTIEKLIRDLERLNEKLRRDVESLVAELEKILSKIKRGGLDERILRELEERVKELEKEAREILKRLAMSCAQESEKAERILEDLERANR

SEQ ID NO: 27531 - protein, 173 aa, Artificial Sequence
  Synthetic
DEARELVKELEDLIREITKTVRRLLEESEELIKRIDDAVDDLRRADEDLNREIKEEIEKGKSKESLEALIERLKESLERVKRTIEKLIRDLERLNEKLRRDVESLVAELEKILSKIKRGGLDERILRELEERVKELEKEAREILKRSEDLTMSCAQESERILEDLERANRRTM

SEQ ID NO: 27532 - protein, 177 aa, Artificial Sequence
  Synthetic
DEARELVKELEDLIREITKTVRRLLEESEELIKRIDDAVDDLRRADEDLNREIKEEIEKGKSKESLEALIERLKESLERVKRTIEKLIRDLERLNEKLRRDVESLVAELEKILSKIKRGGLDERILRELEERVKELEKEAREILKRSEDETDKLRMSCAQESEDLERANRRTMDEAR

SEQ ID NO: 27533 - protein, 163 aa, Artificial Sequence; identical to SEQ ID NO: 27528
  Synthetic

SEQ ID NO: 27534 - protein, 166 aa, Artificial Sequence; identical to SEQ ID NO: 27529
  Synthetic

SEQ ID NO: 27535 - protein, 173 aa, Artificial Sequence; identical to SEQ ID NO: 27531
  Synthetic

SEQ ID NO: 27536 - protein, 177 aa, Artificial Sequence; identical to SEQ ID NO: 27532
  Synthetic

SEQ ID NO: 27537 - protein, 169 aa, Artificial Sequence
  Synthetic
DEIRKVVKEITDLLKASNDKNRKVVEEIRDLLRKSKKLADELVERLRALVEDLRRRIDKSGDKETAEDIVRRIIEELKRILKEIEDLARRINREIERLVEEVERDNRDVNRAIEELLKDIARRGGSEDLKRVEERAREVSRRNEELAMSCAQESDRVSEANKEVLDRVR

SEQ ID NO: 27538 - protein, 173 aa, Artificial Sequence
  Synthetic
DEIRKVVKEITDLLKASNDKNRKVVEEIRDLLRKSKKLADELVERLRALVEDLRRRIDKSGDKETAEDIVRRIIEELKRILKEIEDLARRINREIERLVEEVERDNRDVNRAIEELLKDIARRGGSEDLKRVEERAREVSRRNEESMRRLKMSCAQESEANKEVLDRVREEVK

SEQ ID NO: 27539 - protein, 176 aa, Artificial Sequence
  Synthetic
DEIRKVVKEITDLLKASNDKNRKVVEEIRDLLRKSKKLADELVERLRALVEDLRRRIDKSGDKETAEDIVRRIIEELKRILKEIEDLARRINREIERLVEEVERDNRDVNRAIEELLKDIARRGGSEDLKRVEERAREVSRRNEESMRRVKELAMSCAQESKEVLDRVREEVKRLI

SEQ ID NO: 27540 - protein, 177 aa, Artificial Sequence
  Synthetic
DEIRKVVKEITDLLKASNDKNRKVVEEIRDLLRKSKKLADELVERLRALVEDLRRRIDKSGDKETAEDIVRRIIEELKRILKEIEDLARRINREIERLVEEVERDNRDVNRAIEELLKDIARRGGSEDLKRVEERAREVSRRNEESMRRVKEDLDMSCAQESEVLDRVREEVKRLIE

SEQ ID NO: 27541 - protein, 180 aa, Artificial Sequence
  Synthetic
DEIRKVVKEITDLLKASNDKNRKVVEEIRDLLRKSKKLADELVERLRALVEDLRRRIDKSGDKETAEDIVRRIIEELKRILKEIEDLARRINREIERLVEEVERDNRDVNRAIEELLKDIARRGGSEDLKRVEERAREVSRRNEESMRRVKEDADRLKMSCAQESDRVREEVKRLIEEVR

SEQ ID NO: 27542 - protein, 183 aa, Artificial Sequence
  Synthetic
DEIRKVVKEITDLLKASNDKNRKVVEEIRDLLRKSKKLADELVERLRALVEDLRRRIDKSGDKETAEDIVRRIIEELKRILKEIEDLARRINREIERLVEEVERDNRDVNRAIEELLKDIARRGGSEDLKRVEERAREVSRRNEESMRRVKEDADRVSELAMSCAQESREEVKRLIEEVRETL

SEQ ID NO: 27543 - protein, 169 aa, Artificial Sequence
  Synthetic
DEIRKVVKEITDLLKASNDKNRKVVEEIRDLLRKSKKLADELVERLRALVEDLRRRIDKSGDKETAEDIVRRIIEELKRILKEIEDLARRINREIERLVEEVERDNRDVNRAIEELLKDIARRGGSEDLKRVEERAREVSRRNEELMMSCAQESDRVSEANKEVLDRVR

SEQ ID NO: 27544 - protein, 173 aa, Artificial Sequence; identical to SEQ ID NO: 27538
  Synthetic

SEQ ID NO: 27545 - protein, 176 aa, Artificial Sequence; identical to SEQ ID NO: 27539
  Synthetic

SEQ ID NO: 27546 - protein, 180 aa, Artificial Sequence; identical to SEQ ID NO: 27541
  Synthetic

SEQ ID NO: 27547 - protein, 183 aa, Artificial Sequence
  Synthetic
DEIRKVVKEITDLLKASNDKNRKVVEEIRDLLRKSKKLADELVERLRALVEDLRRRIDKSGDKETAEDIVRRIIEELKRILKEIEDLARRINREIERLVEEVERDNRDVNRAIEELLKDIARRGGSEDLKRVEERAREVSRRNEESMRRVKEDADRVSELTMSCAQESREEVKRLIEEVRETL

SEQ ID NO: 27548 - protein, 161 aa, Artificial Sequence
  Synthetic
STAETVEKKVEEVIRENEKSMRESEEKVDRSTKRIEDVLRRLEETIRKTSDDIAKGVKGERVKEVLEENRRLLEEAKKLVDEVLETNKKLLEDDKRLNEEVSKTLKKLLEEIKSVDTREDATRVIEEAKRILDEARKLNMSCAQESEELVRRIERVIEEII

SEQ ID NO: 27549 - protein, 162 aa, Artificial Sequence
  Synthetic
STAETVEKKVEEVIRENEKSMRESEEKVDRSTKRIEDVLRRLEETIRKTSDDIAKGVKGERVKEVLEENRRLLEEAKKLVDEVLETNKKLLEDDKRLNEEVSKTLKKLLEEIKSVDTREDATRVIEEAKRILDEARKLLKMSCAQESELVRRIERVIEEIIK

SEQ ID NO: 27550 - protein, 165 aa, Artificial Sequence
  Synthetic
STAETVEKKVEEVIRENEKSMRESEEKVDRSTKRIEDVLRRLEETIRKTSDDIAKGVKGERVKEVLEENRRLLEEAKKLVDEVLETNKKLLEDDKRLNEEVSKTLKKLLEEIKSVDTREDATRVIEEAKRILDEARKLNEELIMSCAQESRRIERVIEEIIKRSE

SEQ ID NO: 27551 - protein, 168 aa, Artificial Sequence
  Synthetic
STAETVEKKVEEVIRENEKSMRESEEKVDRSTKRIEDVLRRLEETIRKTSDDIAKGVKGERVKEVLEENRRLLEEAKKLVDEVLETNKKLLEDDKRLNEEVSKTLKKLLEEIKSVDTREDATRVIEEAKRILDEARKLNEETIRLAMSCAQESERVIEEIIKRSEKLL

SEQ ID NO: 27552 - protein, 169 aa, Artificial Sequence
  Synthetic
STAETVEKKVEEVIRENEKSMRESEEKVDRSTKRIEDVLRRLEETIRKTSDDIAKGVKGERVKEVLEENRRLLEEAKKLVDEVLETNKKLLEDDKRLNEEVSKTLKKLLEEIKSVDTREDATRVIEEAKRILDEARKLNEETIRRLEMSCAQESRVIEEIIKRSEKLLE

SEQ ID NO: 27553 - protein, 172 aa, Artificial Sequence
  Synthetic
STAETVEKKVEEVIRENEKSMRESEEKVDRSTKRIEDVLRRLEETIRKTSDDIAKGVKGERVKEVLEENRRLLEEAKKLVDEVLETNKKLLEDDKRLNEEVSKTLKKLLEEIKSVDTREDATRVIEEAKRILDEARKLNEETIRRSEELAMSCAQESEEIIKRSEKLLEDVA

SEQ ID NO: 27554 - protein, 176 aa, Artificial Sequence
  Synthetic
STAETVEKKVEEVIRENEKSMRESEEKVDRSTKRIEDVLRRLEETIRKTSDDIAKGVKGERVKEVLEENRRLLEEAKKLVDEVLETNKKLLEDDKRLNEEVSKTLKKLLEEIKSVDTREDATRVIEEAKRILDEARKLNEETIRRSEELVRRLEMSCAQESKRSEKLLEDVARESK

SEQ ID NO: 27555 - protein, 161 aa, Artificial Sequence; identical to SEQ ID NO: 27548
  Synthetic

SEQ ID NO: 27556 - protein, 162 aa, Artificial Sequence; identical to SEQ ID NO: 27549
  Synthetic

SEQ ID NO: 27557 - protein, 165 aa, Artificial Sequence; identical to SEQ ID NO: 27550
  Synthetic

SEQ ID NO: 27558 - protein, 168 aa, Artificial Sequence; identical to SEQ ID NO: 27551
  Synthetic

SEQ ID NO: 27559 - protein, 169 aa, Artificial Sequence; identical to SEQ ID NO: 27552
  Synthetic

SEQ ID NO: 27560 - protein, 172 aa, Artificial Sequence; identical to SEQ ID NO: 27553
  Synthetic

SEQ ID NO: 27561 - protein, 176 aa, Artificial Sequence; identical to SEQ ID NO: 27554
  Synthetic

SEQ ID NO: 27562 - protein, 161 aa, Artificial Sequence
  Synthetic
STAETVAEEVERVLKHSDDLIKEVEDVNRRVEEEIKRVIRELEEENERLVAEVRKGVKGEILAEIEKRLADNSEKVREVAERAKKLLEENTARVKDILRESRKLVKDLLDEVRGTGSEEAAREIIKRLREVNKRTKELLMSCAQESEEVLERVKRLIDELR

SEQ ID NO: 27563 - protein, 162 aa, Artificial Sequence
  Synthetic
STAETVAEEVERVLKHSDDLIKEVEDVNRRVEEEIKRVIRELEEENERLVAEVRKGVKGEILAEIEKRLADNSEKVREVAERAKKLLEENTARVKDILRESRKLVKDLLDEVRGTGSEEAAREIIKRLREVNKRTKEKLDMSCAQESEVLERVKRLIDELRK

SEQ ID NO: 27564 - protein, 165 aa, Artificial Sequence
  Synthetic
STAETVAEEVERVLKHSDDLIKEVEDVNRRVEEEIKRVIRELEEENERLVAEVRKGVKGEILAEIEKRLADNSEKVREVAERAKKLLEENTARVKDILRESRKLVKDLLDEVRGTGSEEAAREIIKRLREVNKRTKEKLDELIMSCAQESERVKRLIDELRKHSE

SEQ ID NO: 27565 - protein, 168 aa, Artificial Sequence
  Synthetic
STAETVAEEVERVLKHSDDLIKEVEDVNRRVEEEIKRVIRELEEENERLVAEVRKGVKGEILAEIEKRLADNSEKVREVAERAKKLLEENTARVKDILRESRKLVKDLLDEVRGTGSEEAAREIIKRLREVNKRTKEKLDELIKLAMSCAQESKRLIDELRKHSEEVL

SEQ ID NO: 27566 - protein, 172 aa, Artificial Sequence
  Synthetic
STAETVAEEVERVLKHSDDLIKEVEDVNRRVEEEIKRVIRELEEENERLVAEVRKGVKGEILAEIEKRLADNSEKVREVAERAKKLLEENTARVKDILRESRKLVKDLLDEVRGTGSEEAAREIIKRLREVNKRTKEKLDELIKHSEELLMSCAQESDELRKHSEEVLEDLR

SEQ ID NO: 27567 - protein, 176 aa, Artificial Sequence
  Synthetic
STAETVAEEVERVLKHSDDLIKEVEDVNRRVEEEIKRVIRELEEENERLVAEVRKGVKGEILAEIEKRLADNSEKVREVAERAKKLLEENTARVKDILRESRKLVKDLLDEVRGTGSEEAAREIIKRLREVNKRTKEKLDELIKHSEEVLERLKMSCAQESKHSEEVLEDLRRRAK

SEQ ID NO: 27568 - protein, 161 aa, Artificial Sequence; identical to SEQ ID NO: 27562
  Synthetic

SEQ ID NO: 27569 - protein, 162 aa, Artificial Sequence; identical to SEQ ID NO: 27563
  Synthetic

SEQ ID NO: 27570 - protein, 165 aa, Artificial Sequence; identical to SEQ ID NO: 27564
  Synthetic

SEQ ID NO: 27571 - protein, 168 aa, Artificial Sequence; identical to SEQ ID NO: 27565
  Synthetic

SEQ ID NO: 27572 - protein, 176 aa, Artificial Sequence
  Synthetic
STAETVAEEVERVLKHSDDLIKEVEDVNRRVEEEIKRVIRELEEENERLVAEVRKGVKGEILAEIEKRLADNSEKVREVAERAKKLLEENTARVKDILRESRKLVKDLLDEVRGTGSEEAAREIIKRLREVNKRTKEKLDELIKHSEEVLERLIMSCAQESKHSEEVLEDLRRRAK

SEQ ID NO: 27573 - protein, 167 aa, Artificial Sequence
  Synthetic
DEVREVAERLRRLVDESRKRNEEVIKESEALVDRVRKTNEEVMKRLRELIDKLEKDIRRSGDKETVEKIIREVLSAIDELLKRVERTNAEISKENARLLDEVRKTNEEISRRLAKLLEDIRRGSGDAETIERVVRELLEENKELLMSCAQESKRSTETNKRLLEASK

SEQ ID NO: 27574 - protein, 170 aa, Artificial Sequence
  Synthetic
DEVREVAERLRRLVDESRKRNEEVIKESEALVDRVRKTNEEVMKRLRELIDKLEKDIRRSGDKETVEKIIREVLSAIDELLKRVERTNAEISKENARLLDEVRKTNEEISRRLAKLLEDIRRGSGDAETIERVVRELLEENKEVLRLAMSCAQESTETNKRLLEASKEVA

SEQ ID NO: 27575 - protein, 171 aa, Artificial Sequence
  Synthetic
DEVREVAERLRRLVDESRKRNEEVIKESEALVDRVRKTNEEVMKRLRELIDKLEKDIRRSGDKETVEKIIREVLSAIDELLKRVERTNAEISKENARLLDEVRKTNEEISRRLAKLLEDIRRGSGDAETIERVVRELLEENKEVLRKLEMSCAQESETNKRLLEASKEVAD

SEQ ID NO: 27576 - protein, 174 aa, Artificial Sequence
  Synthetic
DEVREVAERLRRLVDESRKRNEEVIKESEALVDRVRKTNEEVMKRLRELIDKLEKDIRRSGDKETVEKIIREVLSAIDELLKRVERTNAEISKENARLLDEVRKTNEEISRRLAKLLEDIRRGSGDAETIERVVRELLEENKEVLRKTEELAMSCAQESKRLLEASKEVADRLR

SEQ ID NO: 27577 - protein, 175 aa, Artificial Sequence
  Synthetic
DEVREVAERLRRLVDESRKRNEEVIKESEALVDRVRKTNEEVMKRLRELIDKLEKDIRRSGDKETVEKIIREVLSAIDELLKRVERTNAEISKENARLLDEVRKTNEEISRRLAKLLEDIRRGSGDAETIERVVRELLEENKEVLRKTEEALKMSCAQESRLLEASKEVADRLRE

SEQ ID NO: 27578 - protein, 178 aa, Artificial Sequence
  Synthetic
DEVREVAERLRRLVDESRKRNEEVIKESEALVDRVRKTNEEVMKRLRELIDKLEKDIRRSGDKETVEKIIREVLSAIDELLKRVERTNAEISKENARLLDEVRKTNEEISRRLAKLLEDIRRGSGDAETIERVVRELLEENKEVLRKTEEAVKRLAMSCAQESEASKEVADRLRERIK

SEQ ID NO: 27579 - protein, 181 aa, Artificial Sequence
  Synthetic
DEVREVAERLRRLVDESRKRNEEVIKESEALVDRVRKTNEEVMKRLRELIDKLEKDIRRSGDKETVEKIIREVLSAIDELLKRVERTNAEISKENARLLDEVRKTNEEISRRLAKLLEDIRRGSGDAETIERVVRELLEENKEVLRKTEEAVKRSTELVMSCAQESKEVADRLRERIKEAA

SEQ ID NO: 27580 - protein, 171 aa, Artificial Sequence
  Synthetic
SRVEEIIEDLRRLLEEIRKENEDSIRRSKELLDRVKEINDTIIAELERLLKDIEKEVREKGSESEEVKKALRAVLEELEKLLRRVAEINEEVLRRNSKLVEEDERRNREVLKELARLVEELIREIGDEDKARKVAEVAEKVLRDIDKLAMSCAQESRATNEEIAKLDEDTA

SEQ ID NO: 27581 - protein, 174 aa, Artificial Sequence
  Synthetic
SRVEEIIEDLRRLLEEIRKENEDSIRRSKELLDRVKEINDTIIAELERLLKDIEKEVREKGSESEEVKKALRAVLEELEKLLRRVAEINEEVLRRNSKLVEEDERRNREVLKELARLVEELIREIGDEDKARKVAEVAEKVLRDIDKLDRLSMSCAQESNEEIAKLDEDTARVA

SEQ ID NO: 27582 - protein, 175 aa, Artificial Sequence
  Synthetic
SRVEEIIEDLRRLLEEIRKENEDSIRRSKELLDRVKEINDTIIAELERLLKDIEKEVREKGSESEEVKKALRAVLEELEKLLRRVAEINEEVLRRNSKLVEEDERRNREVLKELARLVEELIREIGDEDKARKVAEVAEKVLRDIDKLDRELKMSCAQESEEIAKLDEDTARVAE

SEQ ID NO: 27583 - protein, 178 aa, Artificial Sequence
  Synthetic
SRVEEIIEDLRRLLEEIRKENEDSIRRSKELLDRVKEINDTIIAELERLLKDIEKEVREKGSESEEVKKALRAVLEELEKLLRRVAEINEEVLRRNSKLVEEDERRNREVLKELARLVEELIREIGDEDKARKVAEVAEKVLRDIDKLDRESKELGMSCAQESAKLDEDTARVAERVK

SEQ ID NO: 27584 - protein, 179 aa, Artificial Sequence
  Synthetic
SRVEEIIEDLRRLLEEIRKENEDSIRRSKELLDRVKEINDTIIAELERLLKDIEKEVREKGSESEEVKKALRAVLEELEKLLRRVAEINEEVLRRNSKLVEEDERRNREVLKELARLVEELIREIGDEDKARKVAEVAEKVLRDIDKLDRESKEALRMSCAQESKLDEDTARVAERVKK

SEQ ID NO: 27585 - protein, 182 aa, Artificial Sequence
  Synthetic
SRVEEIIEDLRRLLEEIRKENEDSIRRSKELLDRVKEINDTIIAELERLLKDIEKEVREKGSESEEVKKALRAVLEELEKLLRRVAEINEEVLRRNSKLVEEDERRNREVLKELARLVEELIREIGDEDKARKVAEVAEKVLRDIDKLDRESKEAFRALNMSCAQESEDTARVAERVKKAIE

SEQ ID NO: 27586 - protein, 185 aa, Artificial Sequence
  Synthetic
SRVEEIIEDLRRLLEEIRKENEDSIRRSKELLDRVKEINDTIIAELERLLKDIEKEVREKGSESEEVKKALRAVLEELEKLLRRVAEINEEVLRRNSKLVEEDERRNREVLKELARLVEELIREIGDEDKARKVAEVAEKVLRDIDKLDRESKEAFRATNELIMSCAQESARVAERVKKAIEDLA

SEQ ID NO: 27587 - protein, 171 aa, Artificial Sequence
  Synthetic
SRVEEIIEDLRRLLEEIRKENEDSIRRSKELLDRVKEINDTIIAELERLLKDIEKEVREKGSESEEVKKALRAVLEELEKLLRRVAEINEEVLRRNSKLVEEDERRNREVLKELARLVEELIREIGDEDKARKVAEVAEKVLRDIDKLLMSCAQESRATNEEIAKLDEDTA

SEQ ID NO: 27588 - protein, 175 aa, Artificial Sequence; identical to SEQ ID NO: 27582
  Synthetic

SEQ ID NO: 27589 - protein, 178 aa, Artificial Sequence
  Synthetic
SRVEEIIEDLRRLLEEIRKENEDSIRRSKELLDRVKEINDTIIAELERLLKDIEKEVREKGSESEEVKKALRAVLEELEKLLRRVAEINEEVLRRNSKLVEEDERRNREVLKELARLVEELIREIGDEDKARKVAEVAEKVLRDIDKLDRESKELFMSCAQESAKLDEDTARVAERVK

SEQ ID NO: 27590 - protein, 179 aa, Artificial Sequence; identical to SEQ ID NO: 27584
  Synthetic

SEQ ID NO: 27591 - protein, 182 aa, Artificial Sequence
  Synthetic
SRVEEIIEDLRRLLEEIRKENEDSIRRSKELLDRVKEINDTIIAELERLLKDIEKEVREKGSESEEVKKALRAVLEELEKLLRRVAEINEEVLRRNSKLVEEDERRNREVLKELARLVEELIREIGDEDKARKVAEVAEKVLRDIDKLDRESKEAFRALAMSCAQESEDTARVAERVKKAIE

SEQ ID NO: 27592 - protein, 185 aa, Artificial Sequence; identical to SEQ ID NO: 27586
  Synthetic

SEQ ID NO: 27593 - protein, 171 aa, Artificial Sequence
  Synthetic
SEVDEIIKELERLLAEIARENERIIRESRKLADEVRKRNEDAIRKLEELVARLADAVRRKGSESEEVKKLIEDVLREIERLLKRIEEENREVVKRNSELVERVRAINEEILRRVAELVEKIARDIGDKDEVTKVKKVADDVLAEIKKLLMSCAQESEDTNKKIADLDKATR

SEQ ID NO: 27594 - protein, 174 aa, Artificial Sequence
  Synthetic
SEVDEIIKELERLLAEIARENERIIRESRKLADEVRKRNEDAIRKLEELVARLADAVRRKGSESEEVKKLIEDVLREIERLLKRIEEENREVVKRNSELVERVRAINEEILRRVAELVEKIARDIGDKDEVTKVKKVADDVLAEIKKLDDLTMSCAQESNKKIADLDKATRDVV

SEQ ID NO: 27595 - protein, 175 aa, Artificial Sequence
  Synthetic
SEVDEIIKELERLLAEIARENERIIRESRKLADEVRKRNEDAIRKLEELVARLADAVRRKGSESEEVKKLIEDVLREIERLLKRIEEENREVVKRNSELVERVRAINEEILRRVAELVEKIARDIGDKDEVTKVKKVADDVLAEIKKLDDELRMSCAQESKKIADLDKATRDVVR

SEQ ID NO: 27596 - protein, 178 aa, Artificial Sequence
  Synthetic
SEVDEIIKELERLLAEIARENERIIRESRKLADEVRKRNEDAIRKLEELVARLADAVRRKGSESEEVKKLIEDVLREIERLLKRIEEENREVVKRNSELVERVRAINEEILRRVAELVEKIARDIGDKDEVTKVKKVADDVLAEIKKLDDETRRLGMSCAQESADLDKATRDVVRKVL

SEQ ID NO: 27597 - protein, 179 aa, Artificial Sequence
  Synthetic
SEVDEIIKELERLLAEIARENERIIRESRKLADEVRKRNEDAIRKLEELVARLADAVRRKGSESEEVKKLIEDVLREIERLLKRIEEENREVVKRNSELVERVRAINEEILRRVAELVEKIARDIGDKDEVTKVKKVADDVLAEIKKLDDETRRVLEMSCAQESDLDKATRDVVRKVLE

SEQ ID NO: 27598 - protein, 182 aa, Artificial Sequence
  Synthetic
SEVDEIIKELERLLAEIARENERIIRESRKLADEVRKRNEDAIRKLEELVARLADAVRRKGSESEEVKKLIEDVLREIERLLKRIEEENREVVKRNSELVERVRAINEEILRRVAELVEKIARDIGDKDEVTKVKKVADDVLAEIKKLDDETRRVIEDLAMSCAQESKATRDVVRKVLEEVK

SEQ ID NO: 27599 - protein, 185 aa, Artificial Sequence
  Synthetic
SEVDEIIKELERLLAEIARENERIIRESRKLADEVRKRNEDAIRKLEELVARLADAVRRKGSESEEVKKLIEDVLREIERLLKRIEEENREVVKRNSELVERVRAINEEILRRVAELVEKIARDIGDKDEVTKVKKVADDVLAEIKKLDDETRRVIEDTNKLIMSCAQESRDVVRKVLEEVKKLE

SEQ ID NO: 27600 - protein, 165 aa, Artificial Sequence
  Synthetic
REVEEMIKELEELLKDLKEKNERASKRNRELVRRLEEENKRVIEELKKLVKELEDLVRSGEDEEVLREVLKRLEEVLERVRALNERVLEAIEKSLEEVKASNEAVKRRLKELLEEAERGVDSEKLKELRDVIAEVAKRIDELHMSCAQESRRAKKEIERLNRETK

SEQ ID NO: 27601 - protein, 168 aa, Artificial Sequence
  Synthetic
REVEEMIKELEELLKDLKEKNERASKRNRELVRRLEEENKRVIEELKKLVKELEDLVRSGEDEEVLREVLKRLEEVLERVRALNERVLEAIEKSLEEVKASNEAVKRRLKELLEEAERGVDSEKLKELRDVIAEVAKRIDELDELTMSCAQESKKEIERLNRETKKVI

SEQ ID NO: 27602 - protein, 169 aa, Artificial Sequence
  Synthetic
REVEEMIKELEELLKDLKEKNERASKRNRELVRRLEEENKRVIEELKKLVKELEDLVRSGEDEEVLREVLKRLEEVLERVRALNERVLEAIEKSLEEVKASNEAVKRRLKELLEEAERGVDSEKLKELRDVIAEVAKRIDELDEYLRMSCAQESKEIERLNRETKKVIE

SEQ ID NO: 27603 - protein, 172 aa, Artificial Sequence
  Synthetic
REVEEMIKELEELLKDLKEKNERASKRNRELVRRLEEENKRVIEELKKLVKELEDLVRSGEDEEVLREVLKRLEEVLERVRALNERVLEAIEKSLEEVKASNEAVKRRLKELLEEAERGVDSEKLKELRDVIAEVAKRIDELDEYTRELAMSCAQESERLNRETKKVIEEVV

SEQ ID NO: 27604 - protein, 176 aa, Artificial Sequence
  Synthetic
REVEEMIKELEELLKDLKEKNERASKRNRELVRRLEEENKRVIEELKKLVKELEDLVRSGEDEEVLREVLKRLEEVLERVRALNERVLEAIEKSLEEVKASNEAVKRRLKELLEEAERGVDSEKLKELRDVIAEVAKRIDELDEYTRESIRRLKMSCAQESRETKKVIEEVVKRIE

SEQ ID NO: 27605 - protein, 179 aa, Artificial Sequence
  Synthetic
REVEEMIKELEELLKDLKEKNERASKRNRELVRRLEEENKRVIEELKKLVKELEDLVRSGEDEEVLREVLKRLEEVLERVRALNERVLEAIEKSLEEVKASNEAVKRRLKELLEEAERGVDSEKLKELRDVIAEVAKRIDELDEYTRESIRRAKKLIMSCAQESKKVIEEVVKRIEEER

SEQ ID NO: 27606 - protein, 165 aa, Artificial Sequence; identical to SEQ ID NO: 27600
  Synthetic

SEQ ID NO: 27607 - protein, 168 aa, Artificial Sequence; identical to SEQ ID NO: 27601
  Synthetic

SEQ ID NO: 27608 - protein, 169 aa, Artificial Sequence; identical to SEQ ID NO: 27602
  Synthetic

SEQ ID NO: 27609 - protein, 172 aa, Artificial Sequence; identical to SEQ ID NO: 27603
  Synthetic

SEQ ID NO: 27610 - protein, 173 aa, Artificial Sequence
  Synthetic
REVEEMIKELEELLKDLKEKNERASKRNRELVRRLEEENKRVIEELKKLVKELEDLVRSGEDEEVLREVLKRLEEVLERVRALNERVLEAIEKSLEEVKASNEAVKRRLKELLEEAERGVDSEKLKELRDVIAEVAKRIDELDEYTRESLKMSCAQESRLNRETKKVIEEVVK

SEQ ID NO: 27611 - protein, 176 aa, Artificial Sequence
  Synthetic
REVEEMIKELEELLKDLKEKNERASKRNRELVRRLEEENKRVIEELKKLVKELEDLVRSGEDEEVLREVLKRLEEVLERVRALNERVLEAIEKSLEEVKASNEAVKRRLKELLEEAERGVDSEKLKELRDVIAEVAKRIDELDEYTRESIRRLAMSCAQESRETKKVIEEVVKRIE

SEQ ID NO: 27612 - protein, 179 aa, Artificial Sequence; identical to SEQ ID NO: 27605
  Synthetic

SEQ ID NO: 27613 - protein, 166 aa, Artificial Sequence
  Synthetic
DAVEEAEKLIRKVIADSEKLLRDLADLNAKSIRRSEKLVEDDRRANEDVIRKLEELRRNGGSEEELRALLKEVEDTNRASHETNKRLLDEDRALNKEVHDRNEKLLRDIKRLVEEVAKGIDSEELLRRIKKLLDEIKKAIEDLAMSCAQESEESERVMKRSSEDIK

SEQ ID NO: 27614 - protein, 169 aa, Artificial Sequence
  Synthetic
DAVEEAEKLIRKVIADSEKLLRDLADLNAKSIRRSEKLVEDDRRANEDVIRKLEELRRNGGSEEELRALLKEVEDTNRASHETNKRLLDEDRALNKEVHDRNEKLLRDIKRLVEEVAKGIDSEELLRRIKKLLDEIKKAIEDSSRLIMSCAQESERVMKRSSEDIKRTL

SEQ ID NO: 27615 - protein, 173 aa, Artificial Sequence
  Synthetic
DAVEEAEKLIRKVIADSEKLLRDLADLNAKSIRRSEKLVEDDRRANEDVIRKLEELRRNGGSEEELRALLKEVEDTNRASHETNKRLLDEDRALNKEVHDRNEKLLRDIKRLVEEVAKGIDSEELLRRIKKLLDEIKKAIEDSSREIKRLLMSCAQESKRSSEDIKRTLDDTR

SEQ ID NO: 27616 - protein, 176 aa, Artificial Sequence
  Synthetic
DAVEEAEKLIRKVIADSEKLLRDLADLNAKSIRRSEKLVEDDRRANEDVIRKLEELRRNGGSEEELRALLKEVEDTNRASHETNKRLLDEDRALNKEVHDRNEKLLRDIKRLVEEVAKGIDSEELLRRIKKLLDEIKKAIEDSSREIKRLLELAMSCAQESSEDIKRTLDDTRRVV

SEQ ID NO: 27617 - protein, 177 aa, Artificial Sequence
  Synthetic
DAVEEAEKLIRKVIADSEKLLRDLADLNAKSIRRSEKLVEDDRRANEDVIRKLEELRRNGGSEEELRALLKEVEDTNRASHETNKRLLDEDRALNKEVHDRNEKLLRDIKRLVEEVAKGIDSEELLRRIKKLLDEIKKAIEDSSREIKRLLEELEMSCAQESEDIKRTLDDTRRVVE

SEQ ID NO: 27618 - protein, 180 aa, Artificial Sequence
  Synthetic
DAVEEAEKLIRKVIADSEKLLRDLADLNAKSIRRSEKLVEDDRRANEDVIRKLEELRRNGGSEEELRALLKEVEDTNRASHETNKRLLDEDRALNKEVHDRNEKLLRDIKRLVEEVAKGIDSEELLRRIKKLLDEIKKAIEDSSREIKRLLEESERLAMSCAQESKRTLDDTRRVVEEVR

SEQ ID NO: 27619 - protein, 181 aa, Artificial Sequence
  Synthetic
DAVEEAEKLIRKVIADSEKLLRDLADLNAKSIRRSEKLVEDDRRANEDVIRKLEELRRNGGSEEELRALLKEVEDTNRASHETNKRLLDEDRALNKEVHDRNEKLLRDIKRLVEEVAKGIDSEELLRRIKKLLDEIKKAIEDSSREIKRLLEESERVLIMSCAQESRTLDDTRRVVEEVRR

SEQ ID NO: 27620 - protein, 166 aa, Artificial Sequence
  Synthetic
DAVEEAEKLIRKVIADSEKLLRDLADLNAKSIRRSEKLVEDDRRANEDVIRKLEELRRNGGSEEELRALLKEVEDTNRASHETNKRLLDEDRALNKEVHDRNEKLLRDIKRLVEEVAKGIDSEELLRRIKKLLDEIKKAIEDLNMSCAQESEESERVMKRSSEDIK

SEQ ID NO: 27621 - protein, 169 aa, Artificial Sequence; identical to SEQ ID NO: 27614
  Synthetic

SEQ ID NO: 27622 - protein, 173 aa, Artificial Sequence; identical to SEQ ID NO: 27615
  Synthetic

SEQ ID NO: 27623 - protein, 176 aa, Artificial Sequence; identical to SEQ ID NO: 27616
  Synthetic

SEQ ID NO: 27624 - protein, 177 aa, Artificial Sequence; identical to SEQ ID NO: 27617
  Synthetic

SEQ ID NO: 27625 - protein, 180 aa, Artificial Sequence; identical to SEQ ID NO: 27618
  Synthetic

SEQ ID NO: 27626 - protein, 166 aa, Artificial Sequence
  Synthetic
SSDEVLKEIEEIIRRLEAEVRRVNAEVNASTEDLAREVEEVLRATNELIEELERRVTGTEELKRVIDELRDRDRKVRRRVERVIEESAKRDDESRKRLTRAVEKLRADLKKLADDGVPEEALSKAIKDVRDIVKKVKDELKELLMSCAQESDRLSEELKEWLKDVE

SEQ ID NO: 27627 - protein, 160 aa, Artificial Sequence
  Synthetic
SEADDVLKKLAETVKRIIERLKKLTDDSRRLVEEVHRRNDKLSKESAEAVRKAEERGIDEKDVRKLLEDLKKKSEEVAERNKRILDTLREISKRAEDEVRKVLKELEKTLKELEDRRPDSEELSAEVKKLLDEVRKLLMSCAQESDKLLKEIEDSLRRHK

SEQ ID NO: 27628 - protein, 164 aa, Artificial Sequence
  Synthetic
SEADDVLKKLAETVKRIIERLKKLTDDSRRLVEEVHRRNDKLSKESAEAVRKAEERGIDEKDVRKLLEDLKKKSEEVAERNKRILDTLREISKRAEDEVRKVLKELEKTLKELEDRRPDSEELSAEVKKLLDEVRKALARLLMSCAQESKEIEDSLRRHKEEND

SEQ ID NO: 27629 - protein, 167 aa, Artificial Sequence
  Synthetic
SEADDVLKKLAETVKRIIERLKKLTDDSRRLVEEVHRRNDKLSKESAEAVRKAEERGIDEKDVRKLLEDLKKKSEEVAERNKRILDTLREISKRAEDEVRKVLKELEKTLKELEDRRPDSEELSAEVKKLLDEVRKALARHKDLVMSCAQESEDSLRRHKEENDRLL

SEQ ID NO: 27630 - protein, 168 aa, Artificial Sequence
  Synthetic
SEADDVLKKLAETVKRIIERLKKLTDDSRRLVEEVHRRNDKLSKESAEAVRKAEERGIDEKDVRKLLEDLKKKSEEVAERNKRILDTLREISKRAEDEVRKVLKELEKTLKELEDRRPDSEELSAEVKKLLDEVRKALARHKDELDMSCAQESDSLRRHKEENDRLLE

SEQ ID NO: 27631 - protein, 171 aa, Artificial Sequence
  Synthetic
SEADDVLKKLAETVKRIIERLKKLTDDSRRLVEEVHRRNDKLSKESAEAVRKAEERGIDEKDVRKLLEDLKKKSEEVAERNKRILDTLREISKRAEDEVRKVLKELEKTLKELEDRRPDSEELSAEVKKLLDEVRKALARHKDENDKLCMSCAQESRRHKEENDRLLEKLK

SEQ ID NO: 27632 - protein, 174 aa, Artificial Sequence
  Synthetic
SEADDVLKKLAETVKRIIERLKKLTDDSRRLVEEVHRRNDKLSKESAEAVRKAEERGIDEKDVRKLLEDLKKKSEEVAERNKRILDTLREISKRAEDEVRKVLKELEKTLKELEDRRPDSEELSAEVKKLLDEVRKALARHKDENDKLLKLIMSCAQESKEENDRLLEKLKEST

SEQ ID NO: 27633 - protein, 175 aa, Artificial Sequence
  Synthetic
SEADDVLKKLAETVKRIIERLKKLTDDSRRLVEEVHRRNDKLSKESAEAVRKAEERGIDEKDVRKLLEDLKKKSEEVAERNKRILDTLREISKRAEDEVRKVLKELEKTLKELEDRRPDSEELSAEVKKLLDEVRKALARHKDENDKLLKELEMSCAQESEENDRLLEKLKESTR

SEQ ID NO: 27634 - protein, 160 aa, Artificial Sequence; identical to SEQ ID NO: 27627
  Synthetic

SEQ ID NO: 27635 - protein, 164 aa, Artificial Sequence; identical to SEQ ID NO: 27628
  Synthetic

SEQ ID NO: 27636 - protein, 167 aa, Artificial Sequence
  Synthetic
SEADDVLKKLAETVKRIIERLKKLTDDSRRLVEEVHRRNDKLSKESAEAVRKAEERGIDEKDVRKLLEDLKKKSEEVAERNKRILDTLREISKRAEDEVRKVLKELEKTLKELEDRRPDSEELSAEVKKLLDEVRKALARHKDLAMSCAQESEDSLRRHKEENDRLL

SEQ ID NO: 27637 - protein, 168 aa, Artificial Sequence
  Synthetic
SEADDVLKKLAETVKRIIERLKKLTDDSRRLVEEVHRRNDKLSKESAEAVRKAEERGIDEKDVRKLLEDLKKKSEEVAERNKRILDTLREISKRAEDEVRKVLKELEKTLKELEDRRPDSEELSAEVKKLLDEVRKALARHKDELLMSCAQESDSLRRHKEENDRLLE

SEQ ID NO: 27638 - protein, 171 aa, Artificial Sequence
  Synthetic
SEADDVLKKLAETVKRIIERLKKLTDDSRRLVEEVHRRNDKLSKESAEAVRKAEERGIDEKDVRKLLEDLKKKSEEVAERNKRILDTLREISKRAEDEVRKVLKELEKTLKELEDRRPDSEELSAEVKKLLDEVRKALARHKDENDKLMMSCAQESRRHKEENDRLLEKLK

SEQ ID NO: 27639 - protein, 174 aa, Artificial Sequence; identical to SEQ ID NO: 27632
  Synthetic

SEQ ID NO: 27640 - protein, 170 aa, Artificial Sequence
  Synthetic
SEIDEVLTRLRKISKDLNETSDRVNERARKIIDDIKKESKRVNDEAREIVERLKREIDKTRDRDVLRRILKEIEDVARRVKEINEELLARVEKVVREVEEINRELVKRSREAVEAVKRLLDRGVSDEDKVERVVREVEKLHEEDRKLLMSCAQESRKLLEELKRELEKST

SEQ ID NO: 27641 - protein, 171 aa, Artificial Sequence
  Synthetic
SEIDEVLTRLRKISKDLNETSDRVNERARKIIDDIKKESKRVNDEAREIVERLKREIDKTRDRDVLRRILKEIEDVARRVKEINEELLARVEKVVREVEEINRELVKRSREAVEAVKRLLDRGVSDEDKVERVVREVEKLHEEDRKRLEMSCAQESKLLEELKRELEKSTR

SEQ ID NO: 27642 - protein, 174 aa, Artificial Sequence
  Synthetic
SEIDEVLTRLRKISKDLNETSDRVNERARKIIDDIKKESKRVNDEAREIVERLKREIDKTRDRDVLRRILKEIEDVARRVKEINEELLARVEKVVREVEEINRELVKRSREAVEAVKRLLDRGVSDEDKVERVVREVEKLHEEDRKRLEELTMSCAQESEELKRELEKSTRSVK

SEQ ID NO: 27643 - protein, 181 aa, Artificial Sequence
  Synthetic
SEIDEVLTRLRKISKDLNETSDRVNERARKIIDDIKKESKRVNDEAREIVERLKREIDKTRDRDVLRRILKEIEDVARRVKEINEELLARVEKVVREVEEINRELVKRSREAVEAVKRLLDRGVSDEDKVERVVREVEKLHEEDRKRLEESTRSVRKLMMSCAQESEKSTRSVKALVDELR

SEQ ID NO: 27644 - protein, 185 aa, Artificial Sequence
  Synthetic
SEIDEVLTRLRKISKDLNETSDRVNERARKIIDDIKKESKRVNDEAREIVERLKREIDKTRDRDVLRRILKEIEDVARRVKEINEELLARVEKVVREVEEINRELVKRSREAVEAVKRLLDRGVSDEDKVERVVREVEKLHEEDRKRLEESTRSVRKLLEELKMSCAQESRSVKALVDELRERVR

SEQ ID NO: 27645 - protein, 170 aa, Artificial Sequence; identical to SEQ ID NO: 27640
  Synthetic

SEQ ID NO: 27646 - protein, 171 aa, Artificial Sequence; identical to SEQ ID NO: 27641
  Synthetic

SEQ ID NO: 27647 - protein, 174 aa, Artificial Sequence; identical to SEQ ID NO: 27642
  Synthetic

SEQ ID NO: 27648 - protein, 181 aa, Artificial Sequence
  Synthetic
SEIDEVLTRLRKISKDLNETSDRVNERARKIIDDIKKESKRVNDEAREIVERLKREIDKTRDRDVLRRILKEIEDVARRVKEINEELLARVEKVVREVEEINRELVKRSREAVEAVKRLLDRGVSDEDKVERVVREVEKLHEEDRKRLEESTRSVRKLWMSCAQESEKSTRSVKALVDELR

SEQ ID NO: 27649 - protein, 184 aa, Artificial Sequence
  Synthetic
SEIDEVLTRLRKISKDLNETSDRVNERARKIIDDIKKESKRVNDEAREIVERLKREIDKTRDRDVLRRILKEIEDVARRVKEINEELLARVEKVVREVEEINRELVKRSREAVEAVKRLLDRGVSDEDKVERVVREVEKLHEEDRKRLEESTRSVRKLLELAMSCAQESTRSVKALVDELRERV

SEQ ID NO: 27650 - protein, 185 aa, Artificial Sequence; identical to SEQ ID NO: 27644
  Synthetic

SEQ ID NO: 27651 - protein, 163 aa, Artificial Sequence
  Synthetic
SEAEEIRRRLEEISRRSVEHLRKVLEEIKRISERSKRHLDRVLEENARRLEELAELLKRGGDKEELLADLKAVHDESRKVIEKNAEENDRALKAAKEVIDENRERNKRVLDEVRKGGLPEEVLRELEELLKESEERIKRLGMSCAQESDKSREDIKRVLEEIE

SEQ ID NO: 27652 - protein, 166 aa, Artificial Sequence
  Synthetic
SEAEEIRRRLEEISRRSVEHLRKVLEEIKRISERSKRHLDRVLEENARRLEELAELLKRGGDKEELLADLKAVHDESRKVIEKNAEENDRALKAAKEVIDENRERNKRVLDEVRKGGLPEEVLRELEELLKESEERIKRIEELVMSCAQESREDIKRVLEEIERLN

SEQ ID NO: 27653 - protein, 167 aa, Artificial Sequence
  Synthetic
SEAEEIRRRLEEISRRSVEHLRKVLEEIKRISERSKRHLDRVLEENARRLEELAELLKRGGDKEELLADLKAVHDESRKVIEKNAEENDRALKAAKEVIDENRERNKRVLDEVRKGGLPEEVLRELEELLKESEERIKRIEEELKMSCAQESEDIKRVLEEIERLNA

SEQ ID NO: 27654 - protein, 170 aa, Artificial Sequence
  Synthetic
SEAEEIRRRLEEISRRSVEHLRKVLEEIKRISERSKRHLDRVLEENARRLEELAELLKRGGDKEELLADLKAVHDESRKVIEKNAEENDRALKAAKEVIDENRERNKRVLDEVRKGGLPEEVLRELEELLKESEERIKRIEEEIKKLCMSCAQESKRVLEEIERLNAKAA

SEQ ID NO: 27655 - protein, 174 aa, Artificial Sequence
  Synthetic
SEAEEIRRRLEEISRRSVEHLRKVLEEIKRISERSKRHLDRVLEENARRLEELAELLKRGGDKEELLADLKAVHDESRKVIEKNAEENDRALKAAKEVIDENRERNKRVLDEVRKGGLPEEVLRELEELLKESEERIKRIEEEIKKIIDKLRMSCAQESEEIERLNAKAADDLR

SEQ ID NO: 27656 - protein, 169 aa, Artificial Sequence
  Synthetic
SEVDDVLRRLEELIKTLEDINAKSLEDIKKLIDDLAKILEDALRKHEKLIRELREAKKGIDSREAEEIAKRVLEELKRTSDDLRKKVERVDEDLRRLLRENHERNKKILRDLERLLRDAARRGVPKEALDRMREEIRRLEEESRKLLMSCAQESRELRRRVEEVLKTST

SEQ ID NO: 27657 - protein, 172 aa, Artificial Sequence
  Synthetic
SEVDDVLRRLEELIKTLEDINAKSLEDIKKLIDDLAKILEDALRKHEKLIRELREAKKGIDSREAEEIAKRVLEELKRTSDDLRKKVERVDEDLRRLLRENHERNKKILRDLERLLRDAARRGVPKEALDRMREEIRRLEEESRKSDELIMSCAQESRRRVEEVLKTSTDLI

SEQ ID NO: 27658 - protein, 169 aa, Artificial Sequence; identical to SEQ ID NO: 27656
  Synthetic

SEQ ID NO: 27659 - protein, 172 aa, Artificial Sequence; identical to SEQ ID NO: 27657
  Synthetic

SEQ ID NO: 27660 - protein, 163 aa, Artificial Sequence
  Synthetic
SDAEELLKRVADLLKASLESLEKILRDSKELMDRWRKKLEDLLRESEELVDRAEKILRRGGSDKEVLDKIAEEVRRTNDDSRRLDEELHRLSRDTLRKLEENLRRTEKEVREMDKRAAERGVDERVREELKKLLTRVEELAMSCAQESKKILKEAHKESKEVN

SEQ ID NO: 27661 - protein, 167 aa, Artificial Sequence
  Synthetic
SDAEELLKRVADLLKASLESLEKILRDSKELMDRWRKKLEDLLRESEELVDRAEKILRRGGSDKEVLDKIAEEVRRTNDDSRRLDEELHRLSRDTLRKLEENLRRTEKEVREMDKRAAERGVDERVREELKKLLTRVEEEHRKLIMSCAQESKEAHKESKEVNDRDR

SEQ ID NO: 27662 - protein, 174 aa, Artificial Sequence
  Synthetic
SDAEELLKRVADLLKASLESLEKILRDSKELMDRWRKKLEDLLRESEELVDRAEKILRRGGSDKEVLDKIAEEVRRTNDDSRRLDEELHRLSRDTLRKLEENLRRTEKEVREMDKRAAERGVDERVREELKKLLTRVEEEHRKVLETDKKLMMSCAQESKEVNDRDRELLERLE

SEQ ID NO: 27663 - protein, 178 aa, Artificial Sequence
  Synthetic
SDAEELLKRVADLLKASLESLEKILRDSKELMDRWRKKLEDLLRESEELVDRAEKILRRGGSDKEVLDKIAEEVRRTNDDSRRLDEELHRLSRDTLRKLEENLRRTEKEVREMDKRAAERGVDERVREELKKLLTRVEEEHRKVLETDKKILKELEMSCAQESDRDRELLERLEESVR

SEQ ID NO: 27664 - protein, 163 aa, Artificial Sequence
  Synthetic
DAAERAKEKLDKILEDLRDVVRASKENLDRLHAENAETLERSKANLDRLLEKVKKDGVPEELLKELERIIRDLKRKHAKLLEDHRKIIEELKREHDRLLKEAEEIVRRIKDELEKGSDDERDIERILRELEAVLKKLTDLAMSCAQESERVSRDTKKKSKELN

SEQ ID NO: 27665 - protein, 167 aa, Artificial Sequence
  Synthetic
DAAERAKEKLDKILEDLRDVVRASKENLDRLHAENAETLERSKANLDRLLEKVKKDGVPEELLKELERIIRDLKRKHAKLLEDHRKIIEELKREHDRLLKEAEEIVRRIKDELEKGSDDERDIERILRELEAVLKKLTDESERLKMSCAQESRDTKKKSKELNEELK

SEQ ID NO: 27666 - protein, 174 aa, Artificial Sequence
  Synthetic
DAAERAKEKLDKILEDLRDVVRASKENLDRLHAENAETLERSKANLDRLLEKVKKDGVPEELLKELERIIRDLKRKHAKLLEDHRKIIEELKREHDRLLKEAEEIVRRIKDELEKGSDDERDIERILRELEAVLKKLTDESERLNREVERLTMSCAQESKELNEELKAVLDEVK

SEQ ID NO: 27667 - protein, 178 aa, Artificial Sequence
  Synthetic
DAAERAKEKLDKILEDLRDVVRASKENLDRLHAENAETLERSKANLDRLLEKVKKDGVPEELLKELERIIRDLKRKHAKLLEDHRKIIEELKREHDRLLKEAEEIVRRIKDELEKGSDDERDIERILRELEAVLKKLTDESERLNREVERVSRDLKMSCAQESEELKAVLDEVKRKAD

SEQ ID NO: 27668 - protein, 166 aa, Artificial Sequence
  Synthetic
SEIETVRREIEKILDDLRRTVKRIEDEVRKIHEDLRRSLEDSKRNIEEILKDLERAARRDGLDKKVEDDMRKLVEDLKRKHDKLRADNEAVTKELKDRLKKLEDDLARAIEELRRRLDKGLDKEDIDKLLKELRDLVEKIKKLLMSCAQESEEIVRRIKELLKDLN

SEQ ID NO: 27669 - protein, 167 aa, Artificial Sequence
  Synthetic
SEIETVRREIEKILDDLRRTVKRIEDEVRKIHEDLRRSLEDSKRNIEEILKDLERAARRDGLDKKVEDDMRKLVEDLKRKHDKLRADNEAVTKELKDRLKKLEDDLARAIEELRRRLDKGLDKEDIDKLLKELRDLVEKIKKDLKMSCAQESEIVRRIKELLKDLNR

SEQ ID NO: 27670 - protein, 170 aa, Artificial Sequence
  Synthetic
SEIETVRREIEKILDDLRRTVKRIEDEVRKIHEDLRRSLEDSKRNIEEILKDLERAARRDGLDKKVEDDMRKLVEDLKRKHDKLRADNEAVTKELKDRLKKLEDDLARAIEELRRRLDKGLDKEDIDKLLKELRDLVEKIKKDLKELLMSCAQESRRIKELLKDLNREAE

SEQ ID NO: 27671 - protein, 174 aa, Artificial Sequence
  Synthetic
SEIETVRREIEKILDDLRRTVKRIEDEVRKIHEDLRRSLEDSKRNIEEILKDLERAARRDGLDKKVEDDMRKLVEDLKRKHDKLRADNEAVTKELKDRLKKLEDDLARAIEELRRRLDKGLDKEDIDKLLKELRDLVEKIKKDLKELLERLKMSCAQESELLKDLNREAEEVVR

SEQ ID NO: 27672 - protein, 177 aa, Artificial Sequence
  Synthetic
SEIETVRREIEKILDDLRRTVKRIEDEVRKIHEDLRRSLEDSKRNIEEILKDLERAARRDGLDKKVEDDMRKLVEDLKRKHDKLRADNEAVTKELKDRLKKLEDDLARAIEELRRRLDKGLDKEDIDKLLKELRDLVEKIKKDLKELLERYEELAMSCAQESKDLNREAEEVVRRLK

SEQ ID NO: 27673 - protein, 181 aa, Artificial Sequence
  Synthetic
SEIETVRREIEKILDDLRRTVKRIEDEVRKIHEDLRRSLEDSKRNIEEILKDLERAARRDGLDKKVEDDMRKLVEDLKRKHDKLRADNEAVTKELKDRLKKLEDDLARAIEELRRRLDKGLDKEDIDKLLKELRDLVEKIKKDLKELLERYEEIVRRLQMSCAQESREAEEVVRRLKEELR

SEQ ID NO: 27674 - protein, 159 aa, Artificial Sequence
  Synthetic
KELEDVIEEVKKLLKTVNEESRRVAEEVRKLIREVSEELTEVIRRVERLVEEVAKGVDSEEALDAVRKRIEELVRRVEEVNAASKRRIEELEDELRKVDEESRETIERLIDLLRRGLDAETVLRSAEDIVAKNRKLAMSCAQESKKIVEENRKIASEVL

SEQ ID NO: 27675 - protein, 162 aa, Artificial Sequence
  Synthetic
KELEDVIEEVKKLLKTVNEESRRVAEEVRKLIREVSEELTEVIRRVERLVEEVAKGVDSEEALDAVRKRIEELVRRVEEVNAASKRRIEELEDELRKVDEESRETIERLIDLLRRGLDAETVLRSAEDIVAKNRKLAELVMSCAQESVEENRKIASEVLDDV

SEQ ID NO: 27676 - protein, 163 aa, Artificial Sequence
  Synthetic
KELEDVIEEVKKLLKTVNEESRRVAEEVRKLIREVSEELTEVIRRVERLVEEVAKGVDSEEALDAVRKRIEELVRRVEEVNAASKRRIEELEDELRKVDEESRETIERLIDLLRRGLDAETVLRSAEDIVAKNRKLAEELLMSCAQESEENRKIASEVLDDVR

SEQ ID NO: 27677 - protein, 166 aa, Artificial Sequence
  Synthetic
KELEDVIEEVKKLLKTVNEESRRVAEEVRKLIREVSEELTEVIRRVERLVEEVAKGVDSEEALDAVRKRIEELVRRVEEVNAASKRRIEELEDELRKVDEESRETIERLIDLLRRGLDAETVLRSAEDIVAKNRKLAEEVLRLAMSCAQESRKIASEVLDDVRKLV

SEQ ID NO: 27678 - protein, 167 aa, Artificial Sequence
  Synthetic
KELEDVIEEVKKLLKTVNEESRRVAEEVRKLIREVSEELTEVIRRVERLVEEVAKGVDSEEALDAVRKRIEELVRRVEEVNAASKRRIEELEDELRKVDEESRETIERLIDLLRRGLDAETVLRSAEDIVAKNRKLAEEVLRRLLMSCAQESKIASEVLDDVRKLVE

SEQ ID NO: 27679 - protein, 170 aa, Artificial Sequence
  Synthetic
KELEDVIEEVKKLLKTVNEESRRVAEEVRKLIREVSEELTEVIRRVERLVEEVAKGVDSEEALDAVRKRIEELVRRVEEVNAASKRRIEELEDELRKVDEESRETIERLIDLLRRGLDAETVLRSAEDIVAKNRKLAEEVLRRVKKLVMSCAQESSEVLDDVRKLVEDVL

SEQ ID NO: 27680 - protein, 174 aa, Artificial Sequence
  Synthetic
KELEDVIEEVKKLLKTVNEESRRVAEEVRKLIREVSEELTEVIRRVERLVEEVAKGVDSEEALDAVRKRIEELVRRVEEVNAASKRRIEELEDELRKVDEESRETIERLIDLLRRGLDAETVLRSAEDIVAKNRKLAEEVLRRVKKIVEELQMSCAQESDDVRKLVEDVLARAS

SEQ ID NO: 27681 - protein, 168 aa, Artificial Sequence
  Synthetic
SKLEEVEKAVRKVIEDSRRVNEEVNRRSEEVVRELEKVHREVNDASRRVVEKARRVLKGSGDERLAAEVERIIEEIRELNERDRKRVEEIRKEIEDLNRDLNRRSKESEDRLRKLLEDATRGGVTKEADEVVERAERISEENKRLAMSCAQESKELVEDVRRHSEEVV

SEQ ID NO: 27682 - protein, 169 aa, Artificial Sequence
  Synthetic
SKLEEVEKAVRKVIEDSRRVNEEVNRRSEEVVRELEKVHREVNDASRRVVEKARRVLKGSGDERLAAEVERIIEEIRELNERDRKRVEEIRKEIEDLNRDLNRRSKESEDRLRKLLEDATRGGVTKEADEVVERAERISEENKRRLDMSCAQESELVEDVRRHSEEVVR

SEQ ID NO: 27683 - protein, 172 aa, Artificial Sequence
  Synthetic
SKLEEVEKAVRKVIEDSRRVNEEVNRRSEEVVRELEKVHREVNDASRRVVEKARRVLKGSGDERLAAEVERIIEEIRELNERDRKRVEEIRKEIEDLNRDLNRRSKESEDRLRKLLEDATRGGVTKEADEVVERAERISEENKRRVEDLGMSCAQESEDVRRHSEEVVRRVE

SEQ ID NO: 27684 - protein, 176 aa, Artificial Sequence
  Synthetic
SKLEEVEKAVRKVIEDSRRVNEEVNRRSEEVVRELEKVHREVNDASRRVVEKARRVLKGSGDERLAAEVERIIEEIRELNERDRKRVEEIRKEIEDLNRDLNRRSKESEDRLRKLLEDATRGGVTKEADEVVERAERISEENKRRVEDVARKLKMSCAQESRHSEEVVRRVEELVK

SEQ ID NO: 27685 - protein, 179 aa, Artificial Sequence
  Synthetic
SKLEEVEKAVRKVIEDSRRVNEEVNRRSEEVVRELEKVHREVNDASRRVVEKARRVLKGSGDERLAAEVERIIEEIRELNERDRKRVEEIRKEIEDLNRDLNRRSKESEDRLRKLLEDATRGGVTKEADEVVERAERISEENKRRVEDVARKSKELAMSCAQESEEVVRRVEELVKEVE

SEQ ID NO: 27686 - protein, 183 aa, Artificial Sequence
  Synthetic
SKLEEVEKAVRKVIEDSRRVNEEVNRRSEEVVRELEKVHREVNDASRRVVEKARRVLKGSGDERLAAEVERIIEEIRELNERDRKRVEEIRKEIEDLNRDLNRRSKESEDRLRKLLEDATRGGVTKEADEVVERAERISEENKRRVEDVARKSKELVEDLKMSCAQESRRVEELVKEVEERVR

SEQ ID NO: 27687 - protein, 168 aa, Artificial Sequence; identical to SEQ ID NO: 27681
  Synthetic

SEQ ID NO: 27688 - protein, 169 aa, Artificial Sequence
  Synthetic
SKLEEVEKAVRKVIEDSRRVNEEVNRRSEEVVRELEKVHREVNDASRRVVEKARRVLKGSGDERLAAEVERIIEEIRELNERDRKRVEEIRKEIEDLNRDLNRRSKESEDRLRKLLEDATRGGVTKEADEVVERAERISEENKRRLKMSCAQESELVEDVRRHSEEVVR

SEQ ID NO: 27689 - protein, 171 aa, Artificial Sequence
  Synthetic
SKLEEVEKAVRKVIEDSRRVNEEVNRRSEEVVRELEKVHREVNDASRRVVEKARRVLKGSGDERLAAEVERIIEEIRELNERDRKRVEEIRKEIEDLNRDLNRRSKESEDRLRKLLEDATRGGVTKEADEVVERAERISEENKRRVELVMSCAQESVEDVRRHSEEVVRRV

SEQ ID NO: 27690 - protein, 172 aa, Artificial Sequence; identical to SEQ ID NO: 27683
  Synthetic

SEQ ID NO: 27691 - protein, 176 aa, Artificial Sequence; identical to SEQ ID NO: 27684
  Synthetic

SEQ ID NO: 27692 - protein, 179 aa, Artificial Sequence
  Synthetic
SKLEEVEKAVRKVIEDSRRVNEEVNRRSEEVVRELEKVHREVNDASRRVVEKARRVLKGSGDERLAAEVERIIEEIRELNERDRKRVEEIRKEIEDLNRDLNRRSKESEDRLRKLLEDATRGGVTKEADEVVERAERISEENKRRVEDVARKSKELVMSCAQESEEVVRRVEELVKEVE

SEQ ID NO: 27693 - protein, 183 aa, Artificial Sequence; identical to SEQ ID NO: 27686
  Synthetic

SEQ ID NO: 27694 - protein, 162 aa, Artificial Sequence
  Synthetic
SAEEVKEELKRIATKLKEEIKENIRRLEESVEKIAKELAENIKRLEDILRDVKRGLRDERIVKTVEDIARRVVEDNERIMEEDKDVVRRLVERNEEIVRRVDETVKKIVELIDRGEPGEELVERLRRVVEEVRERLKDLLMSCAQESEDSRKAVEDSSAEVA

SEQ ID NO: 27695 - protein, 166 aa, Artificial Sequence
  Synthetic
SAEEVKEELKRIATKLKEEIKENIRRLEESVEKIAKELAENIKRLEDILRDVKRGLRDERIVKTVEDIARRVVEDNERIMEEDKDVVRRLVERNEEIVRRVDETVKKIVELIDRGEPGEELVERLRRVVEEVRERLKDSSRELKMSCAQESKAVEDSSAEVAKVVE

SEQ ID NO: 27696 - protein, 169 aa, Artificial Sequence
  Synthetic
SAEEVKEELKRIATKLKEEIKENIRRLEESVEKIAKELAENIKRLEDILRDVKRGLRDERIVKTVEDIARRVVEDNERIMEEDKDVVRRLVERNEEIVRRVDETVKKIVELIDRGEPGEELVERLRRVVEEVRERLKDSSRELRKLGMSCAQESEDSSAEVAKVVEELE

SEQ ID NO: 27697 - protein, 173 aa, Artificial Sequence
  Synthetic
SAEEVKEELKRIATKLKEEIKENIRRLEESVEKIAKELAENIKRLEDILRDVKRGLRDERIVKTVEDIARRVVEDNERIMEEDKDVVRRLVERNEEIVRRVDETVKKIVELIDRGEPGEELVERLRRVVEEVRERLKDSSRELRKINEDLRMSCAQESAEVAKVVEELERRDT

SEQ ID NO: 27698 - protein, 160 aa, Artificial Sequence
  Synthetic
SEIERVKKRLEELLAEVEESTRRLEERLKRLLEEAKRSSEEVEKELRRLLEAVRRGLSRDEKLVSELEARVKELLEDSRASLEELKKRVRKLAEDSARLLEEVKREVEKLKAKLDRGGDADDVLARVEELAKRAHDLNMSCAQESEELVRAHNKRNKELV

SEQ ID NO: 27699 - protein, 164 aa, Artificial Sequence
  Synthetic
SEIERVKKRLEELLAEVEESTRRLEERLKRLLEEAKRSSEEVEKELRRLLEAVRRGLSRDEKLVSELEARVKELLEDSRASLEELKKRVRKLAEDSARLLEEVKREVEKLKAKLDRGGDADDVLARVEELAKRAHDENERLAMSCAQESRAHNKRNKELVDEVK

SEQ ID NO: 27700 - protein, 168 aa, Artificial Sequence
  Synthetic
SEIERVKKRLEELLAEVEESTRRLEERLKRLLEEAKRSSEEVEKELRRLLEAVRRGLSRDEKLVSELEARVKELLEDSRASLEELKKRVRKLAEDSARLLEEVKREVEKLKAKLDRGGDADDVLARVEELAKRAHDENERLIRELKMSCAQESKRNKELVDEVKRLVE

SEQ ID NO: 27701 - protein, 171 aa, Artificial Sequence
  Synthetic
SEIERVKKRLEELLAEVEESTRRLEERLKRLLEEAKRSSEEVEKELRRLLEAVRRGLSRDEKLVSELEARVKELLEDSRASLEELKKRVRKLAEDSARLLEEVKREVEKLKAKLDRGGDADDVLARVEELAKRAHDENERLIREVEELVMSCAQESKELVDEVKRLVEKVI

SEQ ID NO: 27702 - protein, 175 aa, Artificial Sequence
  Synthetic
SEIERVKKRLEELLAEVEESTRRLEERLKRLLEEAKRSSEEVEKELRRLLEAVRRGLSRDEKLVSELEARVKELLEDSRASLEELKKRVRKLAEDSARLLEEVKREVEKLKAKLDRGGDADDVLARVEELAKRAHDENERLIREVEELVRALQMSCAQESDEVKRLVEKVIEEER

SEQ ID NO: 27703 - protein, 160 aa, Artificial Sequence; identical to SEQ ID NO: 27698
  Synthetic

SEQ ID NO: 27704 - protein, 164 aa, Artificial Sequence
  Synthetic
SEIERVKKRLEELLAEVEESTRRLEERLKRLLEEAKRSSEEVEKELRRLLEAVRRGLSRDEKLVSELEARVKELLEDSRASLEELKKRVRKLAEDSARLLEEVKREVEKLKAKLDRGGDADDVLARVEELAKRAHDENERLIMSCAQESRAHNKRNKELVDEVK

SEQ ID NO: 27705 - protein, 168 aa, Artificial Sequence; identical to SEQ ID NO: 27700
  Synthetic

SEQ ID NO: 27706 - protein, 171 aa, Artificial Sequence; identical to SEQ ID NO: 27701
  Synthetic

SEQ ID NO: 27707 - protein, 175 aa, Artificial Sequence
  Synthetic
SEIERVKKRLEELLAEVEESTRRLEERLKRLLEEAKRSSEEVEKELRRLLEAVRRGLSRDEKLVSELEARVKELLEDSRASLEELKKRVRKLAEDSARLLEEVKREVEKLKAKLDRGGDADDVLARVEELAKRAHDENERLIREVEELVRALAMSCAQESDEVKRLVEKVIEEER

SEQ ID NO: 27708 - protein, 168 aa, Artificial Sequence
  Synthetic
SDVDRVLEEIRKLLEDLKRHSEKVSEENEDLLRANTELNKRVSEDNERLLEELKRLRERGGISEEDLKRALDRVRKTVETVKEENKRSLEDVRRTVETNKRKLERVVEEIKKLIEDAKRRGSGDEEAKKKLDEVLERAKRTIDRLVMSCAQESEKVEADLRRLNEELD

SEQ ID NO: 27709 - protein, 171 aa, Artificial Sequence
  Synthetic
SDVDRVLEEIRKLLEDLKRHSEKVSEENEDLLRANTELNKRVSEDNERLLEELKRLRERGGISEEDLKRALDRVRKTVETVKEENKRSLEDVRRTVETNKRKLERVVEEIKKLIEDAKRRGSGDEEAKKKLDEVLERAKRTIDRLLELAMSCAQESEADLRRLNEELDRSL

SEQ ID NO: 27710 - protein, 172 aa, Artificial Sequence
  Synthetic
SDVDRVLEEIRKLLEDLKRHSEKVSEENEDLLRANTELNKRVSEDNERLLEELKRLRERGGISEEDLKRALDRVRKTVETVKEENKRSLEDVRRTVETNKRKLERVVEEIKKLIEDAKRRGSGDEEAKKKLDEVLERAKRTIDRLLETLEMSCAQESADLRRLNEELDRSLE

SEQ ID NO: 27711 - protein, 175 aa, Artificial Sequence
  Synthetic
SDVDRVLEEIRKLLEDLKRHSEKVSEENEDLLRANTELNKRVSEDNERLLEELKRLRERGGISEEDLKRALDRVRKTVETVKEENKRSLEDVRRTVETNKRKLERVVEEIKKLIEDAKRRGSGDEEAKKKLDEVLERAKRTIDRLLETSDRLLMSCAQESRRLNEELDRSLERAE

SEQ ID NO: 27712 - protein, 182 aa, Artificial Sequence
  Synthetic
SDVDRVLEEIRKLLEDLKRHSEKVSEENEDLLRANTELNKRVSEDNERLLEELKRLRERGGISEEDLKRALDRVRKTVETVKEENKRSLEDVRRTVETNKRKLERVVEEIKKLIEDAKRRGSGDEEAKKKLDEVLERAKRTIDRLLETSDRSLEKVEALLMSCAQESDRSLERAERTIRELA

SEQ ID NO: 27713 - protein, 183 aa, Artificial Sequence
  Synthetic
SDVDRVLEEIRKLLEDLKRHSEKVSEENEDLLRANTELNKRVSEDNERLLEELKRLRERGGISEEDLKRALDRVRKTVETVKEENKRSLEDVRRTVETNKRKLERVVEEIKKLIEDAKRRGSGDEEAKKKLDEVLERAKRTIDRLLETSDRSLEKVEADLRMSCAQESRSLERAERTIRELAK

SEQ ID NO: 27714 - protein, 168 aa, Artificial Sequence
  Synthetic
SDVDRVLEEIRKLLEDLKRHSEKVSEENEDLLRANTELNKRVSEDNERLLEELKRLRERGGISEEDLKRALDRVRKTVETVKEENKRSLEDVRRTVETNKRKLERVVEEIKKLIEDAKRRGSGDEEAKKKLDEVLERAKRTIDRLLMSCAQESEKVEADLRRLNEELD

SEQ ID NO: 27715 - protein, 171 aa, Artificial Sequence; identical to SEQ ID NO: 27709
  Synthetic

SEQ ID NO: 27716 - protein, 172 aa, Artificial Sequence
  Synthetic
SDVDRVLEEIRKLLEDLKRHSEKVSEENEDLLRANTELNKRVSEDNERLLEELKRLRERGGISEEDLKRALDRVRKTVETVKEENKRSLEDVRRTVETNKRKLERVVEEIKKLIEDAKRRGSGDEEAKKKLDEVLERAKRTIDRLLETLDMSCAQESADLRRLNEELDRSLE

SEQ ID NO: 27717 - protein, 175 aa, Artificial Sequence; identical to SEQ ID NO: 27711
  Synthetic

SEQ ID NO: 27718 - protein, 182 aa, Artificial Sequence; identical to SEQ ID NO: 27712
  Synthetic

SEQ ID NO: 27719 - protein, 183 aa, Artificial Sequence
  Synthetic
SDVDRVLEEIRKLLEDLKRHSEKVSEENEDLLRANTELNKRVSEDNERLLEELKRLRERGGISEEDLKRALDRVRKTVETVKEENKRSLEDVRRTVETNKRKLERVVEEIKKLIEDAKRRGSGDEEAKKKLDEVLERAKRTIDRLLETSDRSLEKVEADLSMSCAQESRSLERAERTIRELAK

SEQ ID NO: 27720 - protein, 159 aa, Artificial Sequence
  Synthetic
STEDVLRKIKEDVKRVIDDNRRILDEVRRTSKRVLDDLRANLKHIAEEVERVLRGSDSEEVVRELAKILDEIREEHRRLIRTNEKVLEDIERDHRRISEELKRILDEVDELLRGGKPSKELLEKAKAVVDEIKRLLLMSCAQESDLSRDHKRRAKELND

SEQ ID NO: 27721 - protein, 162 aa, Artificial Sequence
  Synthetic
STEDVLRKIKEDVKRVIDDNRRILDEVRRTSKRVLDDLRANLKHIAEEVERVLRGSDSEEVVRELAKILDEIREEHRRLIRTNEKVLEDIERDHRRISEELKRILDEVDELLRGGKPSKELLEKAKAVVDEIKRLAEELLMSCAQESRDHKRRAKELNDEIA

SEQ ID NO: 27722 - protein, 166 aa, Artificial Sequence
  Synthetic
STEDVLRKIKEDVKRVIDDNRRILDEVRRTSKRVLDDLRANLKHIAEEVERVLRGSDSEEVVRELAKILDEIREEHRRLIRTNEKVLEDIERDHRRISEELKRILDEVDELLRGGKPSKELLEKAKAVVDEIKRLAEESLKRLAMSCAQESRRAKELNDEIAKVVD

SEQ ID NO: 27723 - protein, 169 aa, Artificial Sequence
  Synthetic
STEDVLRKIKEDVKRVIDDNRRILDEVRRTSKRVLDDLRANLKHIAEEVERVLRGSDSEEVVRELAKILDEIREEHRRLIRTNEKVLEDIERDHRRISEELKRILDEVDELLRGGKPSKELLEKAKAVVDEIKRLAEESLKRLEDLCMSCAQESKELNDEIAKVVDELA

SEQ ID NO: 27724 - protein, 170 aa, Artificial Sequence
  Synthetic
STEDVLRKIKEDVKRVIDDNRRILDEVRRTSKRVLDDLRANLKHIAEEVERVLRGSDSEEVVRELAKILDEIREEHRRLIRTNEKVLEDIERDHRRISEELKRILDEVDELLRGGKPSKELLEKAKAVVDEIKRLAEESLKRLEDLLRMSCAQESELNDEIAKVVDELAK

SEQ ID NO: 27725 - protein, 173 aa, Artificial Sequence
  Synthetic
STEDVLRKIKEDVKRVIDDNRRILDEVRRTSKRVLDDLRANLKHIAEEVERVLRGSDSEEVVRELAKILDEIREEHRRLIRTNEKVLEDIERDHRRISEELKRILDEVDELLRGGKPSKELLEKAKAVVDEIKRLAEESLKRLEDLSRDLKMSCAQESDEIAKVVDELAKRAT

SEQ ID NO: 27726 - protein, 165 aa, Artificial Sequence
  Synthetic
SAEELLREVAELVKRVDEDLRRLLEEVRASNEEVIRRLEEILKRIEEENRKVVEELRRGGVSEDLVRESKRLVDESRRVIEKLVKESADSVERTRETVDRLREELKRLVEEIAKMVKGGSSEETVKRLLDELRELLERLKRLIMSCAQESRDLLADAEEKARRLL

SEQ ID NO: 27727 - protein, 166 aa, Artificial Sequence
  Synthetic
SAEELLREVAELVKRVDEDLRRLLEEVRASNEEVIRRLEEILKRIEEENRKVVEELRRGGVSEDLVRESKRLVDESRRVIEKLVKESADSVERTRETVDRLREELKRLVEEIAKMVKGGSSEETVKRLLDELRELLERLKRTLEMSCAQESDLLADAEEKARRLLE

SEQ ID NO: 27728 - protein, 169 aa, Artificial Sequence
  Synthetic
SAEELLREVAELVKRVDEDLRRLLEEVRASNEEVIRRLEEILKRIEEENRKVVEELRRGGVSEDLVRESKRLVDESRRVIEKLVKESADSVERTRETVDRLREELKRLVEEIAKMVKGGSSEETVKRLLDELRELLERLKRTIEELLMSCAQESADAEEKARRLLEENR

SEQ ID NO: 27729 - protein, 176 aa, Artificial Sequence
  Synthetic
SAEELLREVAELVKRVDEDLRRLLEEVRASNEEVIRRLEEILKRIEEENRKVVEELRRGGVSEDLVRESKRLVDESRRVIEKLVKESADSVERTRETVDRLREELKRLVEEIAKMVKGGSSEETVKRLLDELRELLERLKRTIEELLKRNRDLCMSCAQESRRLLEENRKLLKAAR

SEQ ID NO: 27730 - protein, 180 aa, Artificial Sequence
  Synthetic
SAEELLREVAELVKRVDEDLRRLLEEVRASNEEVIRRLEEILKRIEEENRKVVEELRRGGVSEDLVRESKRLVDESRRVIEKLVKESADSVERTRETVDRLREELKRLVEEIAKMVKGGSSEETVKRLLDELRELLERLKRTIEELLKRNRDLLADLLMSCAQESEENRKLLKAARDTAT

SEQ ID NO: 27731 - protein, 162 aa, Artificial Sequence
  Synthetic
SEDEDLDRVAEKLAREHKKSVEEIKRVLKSADEESKKLVRDTERVIEEIKREVEEARRGNIDEELVERLKKKIEDILRTLEERHKKLIKELREILKRLSDESRRLAEETEKVLEDLERKGVDEEVLKKLAEIVRRVKELNMSCAQESEKRLRELEEENKKVI

SEQ ID NO: 27732 - protein, 163 aa, Artificial Sequence
  Synthetic
SEDEDLDRVAEKLAREHKKSVEEIKRVLKSADEESKKLVRDTERVIEEIKREVEEARRGNIDEELVERLKKKIEDILRTLEERHKKLIKELREILKRLSDESRRLAEETEKVLEDLERKGVDEEVLKKLAEIVRRVKEELRMSCAQESKRLRELEEENKKVIE

SEQ ID NO: 27733 - protein, 166 aa, Artificial Sequence
  Synthetic
SEDEDLDRVAEKLAREHKKSVEEIKRVLKSADEESKKLVRDTERVIEEIKREVEEARRGNIDEELVERLKKKIEDILRTLEERHKKLIKELREILKRLSDESRRLAEETEKVLEDLERKGVDEEVLKKLAEIVRRVKEENRKLVMSCAQESRELEEENKKVIEDLK

SEQ ID NO: 27734 - protein, 170 aa, Artificial Sequence
  Synthetic
SEDEDLDRVAEKLAREHKKSVEEIKRVLKSADEESKKLVRDTERVIEEIKREVEEARRGNIDEELVERLKKKIEDILRTLEERHKKLIKELREILKRLSDESRRLAEETEKVLEDLERKGVDEEVLKKLAEIVRRVKEENRKVNEELKMSCAQESEENKKVIEDLKSTVE

SEQ ID NO: 27735 - protein, 162 aa, Artificial Sequence
  Synthetic
SEDEDLDRVAEKLAREHKKSVEEIKRVLKSADEESKKLVRDTERVIEEIKREVEEARRGNIDEELVERLKKKIEDILRTLEERHKKLIKELREILKRLSDESRRLAEETEKVLEDLERKGVDEEVLKKLAEIVRRVKELAMSCAQESEKRLRELEEENKKVI

SEQ ID NO: 27736 - protein, 163 aa, Artificial Sequence; identical to SEQ ID NO: 27732
  Synthetic

SEQ ID NO: 27737 - protein, 166 aa, Artificial Sequence; identical to SEQ ID NO: 27733
  Synthetic

SEQ ID NO: 27738 - protein, 170 aa, Artificial Sequence
  Synthetic
SEDEDLDRVAEKLAREHKKSVEEIKRVLKSADEESKKLVRDTERVIEEIKREVEEARRGNIDEELVERLKKKIEDILRTLEERHKKLIKELREILKRLSDESRRLAEETEKVLEDLERKGVDEEVLKKLAEIVRRVKEENRKVNEELAMSCAQESEENKKVIEDLKSTVE

SEQ ID NO: 27739 - protein, 173 aa, Artificial Sequence
  Synthetic
SEDEDLDRVAEKLAREHKKSVEEIKRVLKSADEESKKLVRDTERVIEEIKREVEEARRGNIDEELVERLKKKIEDILRTLEERHKKLIKELREILKRLSDESRRLAEETEKVLEDLERKGVDEEVLKKLAEIVRRVKEENRKVNEEVEKLLMSCAQESKKVIEDLKSTVEELV

SEQ ID NO: 27740 - protein, 165 aa, Artificial Sequence
  Synthetic
DEVEDVLRKIEKILDDHRKRIEKNSRDMARIIDEHRRKVEENSREMKKLVDDLKKAVDRGEGDEETAEDVKAKLEKSNRELEKHSEEVKRALDESNEDLRRHSEEVKERIERLVKKLREDGVEREEELKEVADRVKEKLDRLDMSCAQESEELKRELDKINDENR

SEQ ID NO: 27741 - protein, 169 aa, Artificial Sequence
  Synthetic
DEVEDVLRKIEKILDDHRKRIEKNSRDMARIIDEHRRKVEENSREMKKLVDDLKKAVDRGEGDEETAEDVKAKLEKSNRELEKHSEEVKRALDESNEDLRRHSEEVKERIERLVKKLREDGVEREEELKEVADRVKEKLDRLNRELEMSCAQESRELDKINDENRETSE

SEQ ID NO: 27742 - protein, 172 aa, Artificial Sequence
  Synthetic
DEVEDVLRKIEKILDDHRKRIEKNSRDMARIIDEHRRKVEENSREMKKLVDDLKKAVDRGEGDEETAEDVKAKLEKSNRELEKHSEEVKRALDESNEDLRRHSEEVKERIERLVKKLREDGVEREEELKEVADRVKEKLDRLNRENEKLAMSCAQESDKINDENRETSERLK

SEQ ID NO: 27743 - protein, 176 aa, Artificial Sequence
  Synthetic
DEVEDVLRKIEKILDDHRKRIEKNSRDMARIIDEHRRKVEENSREMKKLVDDLKKAVDRGEGDEETAEDVKAKLEKSNRELEKHSEEVKRALDESNEDLRRHSEEVKERIERLVKKLREDGVEREEELKEVADRVKEKLDRLNRENEKSSEELKMSCAQESDENRETSERLKREID

SEQ ID NO: 27744 - protein, 179 aa, Artificial Sequence
  Synthetic
DEVEDVLRKIEKILDDHRKRIEKNSRDMARIIDEHRRKVEENSREMKKLVDDLKKAVDRGEGDEETAEDVKAKLEKSNRELEKHSEEVKRALDESNEDLRRHSEEVKERIERLVKKLREDGVEREEELKEVADRVKEKLDRLNRENEKSSEELKRLAMSCAQESRETSERLKREIDETT

SEQ ID NO: 27745 - protein, 180 aa, Artificial Sequence
  Synthetic
DEVEDVLRKIEKILDDHRKRIEKNSRDMARIIDEHRRKVEENSREMKKLVDDLKKAVDRGEGDEETAEDVKAKLEKSNRELEKHSEEVKRALDESNEDLRRHSEEVKERIERLVKKLREDGVEREEELKEVADRVKEKLDRLNRENEKSSEELKRELDMSCAQESETSERLKREIDETTR

SEQ ID NO: 27746 - protein, 163 aa, Artificial Sequence
  Synthetic
SKEDRLREELKKLLARLAEEIERLKRALEESNKDLKRTIDASEKHLRDVNEDVKRGGVSEELLRELERSTAENKERAKELLKRHEDLVRKVEKELADLLRRLEEIVARVDEALKRGISEEELDKLLKEARDLIREIEKRLEMSCAQESKLTEDAKRDLERSNR

SEQ ID NO: 27747 - protein, 166 aa, Artificial Sequence
  Synthetic
SKEDRLREELKKLLARLAEEIERLKRALEESNKDLKRTIDASEKHLRDVNEDVKRGGVSEELLRELERSTAENKERAKELLKRHEDLVRKVEKELADLLRRLEEIVARVDEALKRGISEEELDKLLKEARDLIREIEKRLEELLMSCAQESEDAKRDLERSNREHK

SEQ ID NO: 27748 - protein, 169 aa, Artificial Sequence
  Synthetic
SKEDRLREELKKLLARLAEEIERLKRALEESNKDLKRTIDASEKHLRDVNEDVKRGGVSEELLRELERSTAENKERAKELLKRHEDLVRKVEKELADLLRRLEEIVARVDEALKRGISEEELDKLLKEARDLIREIEKRLEELLKLTMSCAQESKRDLERSNREHKELA

SEQ ID NO: 27749 - protein, 170 aa, Artificial Sequence
  Synthetic
SKEDRLREELKKLLARLAEEIERLKRALEESNKDLKRTIDASEKHLRDVNEDVKRGGVSEELLRELERSTAENKERAKELLKRHEDLVRKVEKELADLLRRLEEIVARVDEALKRGISEEELDKLLKEARDLIREIEKRLEELLKRLQMSCAQESRDLERSNREHKELAD

SEQ ID NO: 27750 - protein, 173 aa, Artificial Sequence
  Synthetic
SKEDRLREELKKLLARLAEEIERLKRALEESNKDLKRTIDASEKHLRDVNEDVKRGGVSEELLRELERSTAENKERAKELLKRHEDLVRKVEKELADLLRRLEEIVARVDEALKRGISEEELDKLLKEARDLIREIEKRLEELLKRVEKLAMSCAQESERSNREHKELADRIK

SEQ ID NO: 27751 - protein, 177 aa, Artificial Sequence
  Synthetic
SKEDRLREELKKLLARLAEEIERLKRALEESNKDLKRTIDASEKHLRDVNEDVKRGGVSEELLRELERSTAENKERAKELLKRHEDLVRKVEKELADLLRRLEEIVARVDEALKRGISEEELDKLLKEARDLIREIEKRLEELLKRVEKLTEDLKMSCAQESREHKELADRIKETAR

SEQ ID NO: 27752 - protein, 162 aa, Artificial Sequence
  Synthetic
SKEDRLREELKKLLARLAEEIERLKRALEESNKDLKRTIDASEKHLRDVNEDVKRGGVSEELLRELERSTAENKERAKELLKRHEDLVRKVEKELADLLRRLEEIVARVDEALKRGISEEELDKLLKEARDLIREIEKLLMSCAQESEKLTEDAKRDLERSN

SEQ ID NO: 27753 - protein, 163 aa, Artificial Sequence; identical to SEQ ID NO: 27746
  Synthetic

SEQ ID NO: 27754 - protein, 166 aa, Artificial Sequence; identical to SEQ ID NO: 27747
  Synthetic

SEQ ID NO: 27755 - protein, 170 aa, Artificial Sequence; identical to SEQ ID NO: 27749
  Synthetic

SEQ ID NO: 27756 - protein, 173 aa, Artificial Sequence; identical to SEQ ID NO: 27750
  Synthetic

SEQ ID NO: 27757 - protein, 177 aa, Artificial Sequence; identical to SEQ ID NO: 27751
  Synthetic

SEQ ID NO: 27758 - protein, 170 aa, Artificial Sequence
  Synthetic
SSVEELLERLRRISEENKRRIEKLLREVEKVLRELKDRHRKLLKRVEEIIRKVKEEIKSGLPEEAVKRVLERVRERVKEVLEEADRLNDEMRRIVTEVEKELDKSDKEVEDAVRDILKKIEEGVRDRETAERARETLKRLLDENRDLSMSCAQESRRILEDLTRTTERVK

SEQ ID NO: 27759 - protein, 171 aa, Artificial Sequence
  Synthetic
SSVEELLERLRRISEENKRRIEKLLREVEKVLRELKDRHRKLLKRVEEIIRKVKEEIKSGLPEEAVKRVLERVRERVKEVLEEADRLNDEMRRIVTEVEKELDKSDKEVEDAVRDILKKIEEGVRDRETAERARETLKRLLDENRDRLRMSCAQESRILEDLTRTTERVKR

SEQ ID NO: 27760 - protein, 174 aa, Artificial Sequence
  Synthetic
SSVEELLERLRRISEENKRRIEKLLREVEKVLRELKDRHRKLLKRVEEIIRKVKEEIKSGLPEEAVKRVLERVRERVKEVLEEADRLNDEMRRIVTEVEKELDKSDKEVEDAVRDILKKIEEGVRDRETAERARETLKRLLDENRDRSKKLKMSCAQESEDLTRTTERVKREIA

SEQ ID NO: 27761 - protein, 177 aa, Artificial Sequence
  Synthetic
SSVEELLERLRRISEENKRRIEKLLREVEKVLRELKDRHRKLLKRVEEIIRKVKEEIKSGLPEEAVKRVLERVRERVKEVLEEADRLNDEMRRIVTEVEKELDKSDKEVEDAVRDILKKIEEGVRDRETAERARETLKRLLDENRDRSKKVKELIMSCAQESTRTTERVKREIAKLL

SEQ ID NO: 27762 - protein, 178 aa, Artificial Sequence
  Synthetic
SSVEELLERLRRISEENKRRIEKLLREVEKVLRELKDRHRKLLKRVEEIIRKVKEEIKSGLPEEAVKRVLERVRERVKEVLEEADRLNDEMRRIVTEVEKELDKSDKEVEDAVRDILKKIEEGVRDRETAERARETLKRLLDENRDRSKKVKEELRMSCAQESRTTERVKREIAKLLK

SEQ ID NO: 27763 - protein, 181 aa, Artificial Sequence
  Synthetic
SSVEELLERLRRISEENKRRIEKLLREVEKVLRELKDRHRKLLKRVEEIIRKVKEEIKSGLPEEAVKRVLERVRERVKEVLEEADRLNDEMRRIVTEVEKELDKSDKEVEDAVRDILKKIEEGVRDRETAERARETLKRLLDENRDRSKKVKEEIRRLLMSCAQESERVKREIAKLLKELE

SEQ ID NO: 27764 - protein, 184 aa, Artificial Sequence
  Synthetic
SSVEELLERLRRISEENKRRIEKLLREVEKVLRELKDRHRKLLKRVEEIIRKVKEEIKSGLPEEAVKRVLERVRERVKEVLEEADRLNDEMRRIVTEVEKELDKSDKEVEDAVRDILKKIEEGVRDRETAERARETLKRLLDENRDRSKKVKEEIRRILELLMSCAQESKREIAKLLKELEDTA

SEQ ID NO: 27765 - protein, 185 aa, Artificial Sequence
  Synthetic
SSVEELLERLRRISEENKRRIEKLLREVEKVLRELKDRHRKLLKRVEEIIRKVKEEIKSGLPEEAVKRVLERVRERVKEVLEEADRLNDEMRRIVTEVEKELDKSDKEVEDAVRDILKKIEEGVRDRETAERARETLKRLLDENRDRSKKVKEEIRRILEDLTMSCAQESREIAKLLKELEDTAR

SEQ ID NO: 27766 - protein, 170 aa, Artificial Sequence; identical to SEQ ID NO: 27758
  Synthetic

SEQ ID NO: 27767 - protein, 171 aa, Artificial Sequence; identical to SEQ ID NO: 27759
  Synthetic

SEQ ID NO: 27768 - protein, 174 aa, Artificial Sequence; identical to SEQ ID NO: 27760
  Synthetic

SEQ ID NO: 27769 - protein, 177 aa, Artificial Sequence; identical to SEQ ID NO: 27761
  Synthetic

SEQ ID NO: 27770 - protein, 178 aa, Artificial Sequence; identical to SEQ ID NO: 27762
  Synthetic

SEQ ID NO: 27771 - protein, 181 aa, Artificial Sequence; identical to SEQ ID NO: 27763
  Synthetic

SEQ ID NO: 27772 - protein, 185 aa, Artificial Sequence; identical to SEQ ID NO: 27765
  Synthetic

SEQ ID NO: 27773 - protein, 165 aa, Artificial Sequence
  Synthetic
SELEEVLRRIEALVRKAHKENEDVLREIERLVRTAHRLNKKVDDDSAKIAEDLKRGGREDKDKVEEALRRLRELYRRLEEENRRILREIEELVKELEKRNREILKELEDLVADAERKGSDGSEAVRRLKEILERLKEEVRRLLMSCAQESERLKKEVEDSLRELK

SEQ ID NO: 27774 - protein, 169 aa, Artificial Sequence
  Synthetic
SELEEVLRRIEALVRKAHKENEDVLREIERLVRTAHRLNKKVDDDSAKIAEDLKRGGREDKDKVEEALRRLRELYRRLEEENRRILREIEELVKELEKRNREILKELEDLVADAERKGSDGSEAVRRLKEILERLKEEVRRSLEELRMSCAQESKEVEDSLRELKKSLE

SEQ ID NO: 27775 - protein, 176 aa, Artificial Sequence
  Synthetic
SELEEVLRRIEALVRKAHKENEDVLREIERLVRTAHRLNKKVDDDSAKIAEDLKRGGREDKDKVEEALRRLRELYRRLEEENRRILREIEELVKELEKRNREILKELEDLVADAERKGSDGSEAVRRLKEILERLKEEVRRSLEELRKEVERLQMSCAQESRELKKSLEEWVKSLE

SEQ ID NO: 27776 - protein, 179 aa, Artificial Sequence
  Synthetic
SELEEVLRRIEALVRKAHKENEDVLREIERLVRTAHRLNKKVDDDSAKIAEDLKRGGREDKDKVEEALRRLRELYRRLEEENRRILREIEELVKELEKRNREILKELEDLVADAERKGSDGSEAVRRLKEILERLKEEVRRSLEELRKEVERLKKLVMSCAQESKKSLEEWVKSLEEAT

SEQ ID NO: 27777 - protein, 180 aa, Artificial Sequence
  Synthetic
SELEEVLRRIEALVRKAHKENEDVLREIERLVRTAHRLNKKVDDDSAKIAEDLKRGGREDKDKVEEALRRLRELYRRLEEENRRILREIEELVKELEKRNREILKELEDLVADAERKGSDGSEAVRRLKEILERLKEEVRRSLEELRKEVERLKKELEMSCAQESKSLEEWVKSLEEATR

SEQ ID NO: 27778 - protein, 165 aa, Artificial Sequence; identical to SEQ ID NO: 27773
  Synthetic

SEQ ID NO: 27779 - protein, 169 aa, Artificial Sequence; identical to SEQ ID NO: 27774
  Synthetic

SEQ ID NO: 27780 - protein, 176 aa, Artificial Sequence; identical to SEQ ID NO: 27775
  Synthetic

SEQ ID NO: 27781 - protein, 179 aa, Artificial Sequence; identical to SEQ ID NO: 27776
  Synthetic

SEQ ID NO: 27782 - protein, 180 aa, Artificial Sequence; identical to SEQ ID NO: 27777
  Synthetic

SEQ ID NO: 27783 - protein, 157 aa, Artificial Sequence
  Synthetic
SKEEELEKLLREHHEKIKRLKEESKRINDRIRRTVEELIKESEKINRDINDTVRKGDRDEEVIRRLLEDVRRKHEELRERLKRELDKVRERHKELLDRARRATEAVKERLDRGGLSEDSVERIARELERNLDDLRMSCAQESDDLAEILRRLKEVLE

SEQ ID NO: 27784 - protein, 160 aa, Artificial Sequence
  Synthetic
SKEEELEKLLREHHEKIKRLKEESKRINDRIRRTVEELIKESEKINRDINDTVRKGDRDEEVIRRLLEDVRRKHEELRERLKRELDKVRERHKELLDRARRATEAVKERLDRGGLSEDSVERIARELERNLDDLARLVMSCAQESAEILRRLKEVLEESE

SEQ ID NO: 27785 - protein, 164 aa, Artificial Sequence
  Synthetic
SKEEELEKLLREHHEKIKRLKEESKRINDRIRRTVEELIKESEKINRDINDTVRKGDRDEEVIRRLLEDVRRKHEELRERLKRELDKVRERHKELLDRARRATEAVKERLDRGGLSEDSVERIARELERNLDDLARVLKELEMSCAQESRRLKEVLEESERDLE

SEQ ID NO: 27786 - protein, 167 aa, Artificial Sequence
  Synthetic
SKEEELEKLLREHHEKIKRLKEESKRINDRIRRTVEELIKESEKINRDINDTVRKGDRDEEVIRRLLEDVRRKHEELRERLKRELDKVRERHKELLDRARRATEAVKERLDRGGLSEDSVERIARELERNLDDLARVLKESEDLLMSCAQESKEVLEESERDLERVE

SEQ ID NO: 27787 - protein, 168 aa, Artificial Sequence
  Synthetic
SKEEELEKLLREHHEKIKRLKEESKRINDRIRRTVEELIKESEKINRDINDTVRKGDRDEEVIRRLLEDVRRKHEELRERLKRELDKVRERHKELLDRARRATEAVKERLDRGGLSEDSVERIARELERNLDDLARVLKESEDDLRMSCAQESEVLEESERDLERVER

SEQ ID NO: 27788 - protein, 171 aa, Artificial Sequence
  Synthetic
SKEEELEKLLREHHEKIKRLKEESKRINDRIRRTVEELIKESEKINRDINDTVRKGDRDEEVIRRLLEDVRRKHEELRERLKRELDKVRERHKELLDRARRATEAVKERLDRGGLSEDSVERIARELERNLDDLARVLKESEDDLAELYMSCAQESEESERDLERVEREVR

SEQ ID NO: 27789 - protein, 223 aa, Artificial Sequence
  Synthetic
EEDERLTKRVEEIKRENRELLRRLEEEVKELERKSEKIVRDLKEKVDRAKEKLDSGKGSTELLVEELEKLIREILKLSEDHNRTLEEVVRKIEDVLRANLERLKELVDEILKALKERGKGDSEELKRKVEKVARDYERLLRKLREVVKRILDESKRLDEELEERLKEVLKKLEELIKRGGPDKDVLTELKRILDELLKLLKMSCAQESRLLEELLRLVREILR

SEQ ID NO: 27790 - protein, 226 aa, Artificial Sequence
  Synthetic
EEDERLTKRVEEIKRENRELLRRLEEEVKELERKSEKIVRDLKEKVDRAKEKLDSGKGSTELLVEELEKLIREILKLSEDHNRTLEEVVRKIEDVLRANLERLKELVDEILKALKERGKGDSEELKRKVEKVARDYERLLRKLREVVKRILDESKRLDEELEERLKEVLKKLEELIKRGGPDKDVLTELKRILDELLKLVEKLIMSCAQESEELLRLVREILRTSN

SEQ ID NO: 27791 - protein, 230 aa, Artificial Sequence
  Synthetic
EEDERLTKRVEEIKRENRELLRRLEEEVKELERKSEKIVRDLKEKVDRAKEKLDSGKGSTELLVEELEKLIREILKLSEDHNRTLEEVVRKIEDVLRANLERLKELVDEILKALKERGKGDSEELKRKVEKVARDYERLLRKLREVVKRILDESKRLDEELEERLKEVLKKLEELIKRGGPDKDVLTELKRILDELLKLVEKLIRRLLMSCAQESRLVREILRTSNEILE

SEQ ID NO: 27792 - protein, 237 aa, Artificial Sequence
  Synthetic
EEDERLTKRVEEIKRENRELLRRLEEEVKELERKSEKIVRDLKEKVDRAKEKLDSGKGSTELLVEELEKLIREILKLSEDHNRTLEEVVRKIEDVLRANLERLKELVDEILKALKERGKGDSEELKRKVEKVARDYERLLRKLREVVKRILDESKRLDEELEERLKEVLKKLEELIKRGGPDKDVLTELKRILDELLKLVEKLIRRNLRLLEELLMSCAQESRTSNEILEEILKDAR

SEQ ID NO: 27793 - protein, 223 aa, Artificial Sequence
  Synthetic
EEDERLTKRVEEIKRENRELLRRLEEEVKELERKSEKIVRDLKEKVDRAKEKLDSGKGSTELLVEELEKLIREILKLSEDHNRTLEEVVRKIEDVLRANLERLKELVDEILKALKERGKGDSEELKRKVEKVARDYERLLRKLREVVKRILDESKRLDEELEERLKEVLKKLEELIKRGGPDKDVLTELKRILDELLKLLVMSCAQESRLLEELLRLVREILR

SEQ ID NO: 27794 - protein, 226 aa, Artificial Sequence; identical to SEQ ID NO: 27790
  Synthetic

SEQ ID NO: 27795 - protein, 230 aa, Artificial Sequence; identical to SEQ ID NO: 27791
  Synthetic

SEQ ID NO: 27796 - protein, 236 aa, Artificial Sequence
  Synthetic
EEDERLTKRVEEIKRENRELLRRLEEEVKELERKSEKIVRDLKEKVDRAKEKLDSGKGSTELLVEELEKLIREILKLSEDHNRTLEEVVRKIEDVLRANLERLKELVDEILKALKERGKGDSEELKRKVEKVARDYERLLRKLREVVKRILDESKRLDEELEERLKEVLKKLEELIKRGGPDKDVLTELKRILDELLKLVEKLIRRNLRLLELLMSCAQESLRTSNEILEEILKDA

SEQ ID NO: 27797 - protein, 237 aa, Artificial Sequence; identical to SEQ ID NO: 27792
  Synthetic

SEQ ID NO: 27798 - protein, 230 aa, Artificial Sequence
  Synthetic
TEEEVLRKVEKLIKDLLDVLRDLLRASEEVVREALRVLEELIEENKRVIEELSRALSGGSRESVESALAKNEERLKKILEDADRVLDKWRRLLEELSKKAKAVLDEVRKRLEEIKREVPETEKLRTLLTILEEILRALEKIIRDILRINERLLEKLKRILERLRETNREIDERIRKLVEEARGGSEEKLRRDLTETKKELEKRHEDLIMSCAQESRDYKRELEEIERALE

SEQ ID NO: 27799 - protein, 230 aa, Artificial Sequence
  Synthetic
TEEEVLRKVEKLIKDLLDVLRDLLRASEEVVREALRVLEELIEENKRVIEELSRALSGGSRESVESALAKNEERLKKILEDADRVLDKWRRLLEELSKKAKAVLDEVRKRLEEIKREVPETEKLRTLLTILEEILRALEKIIRDILRINERLLEKLKRILERLRETNREIDERIRKLVEEARGGSEEKLRRDLTETKKELEKRHEDLLMSCAQESRDYKRELEEIERALE

SEQ ID NO: 27800 - protein, 219 aa, Artificial Sequence
  Synthetic
SAKETIRKLIEENKDIIRKLAEKLKRLLEESERIAEEALRLIKELLERIERALRRVGSGIDEELLKELEKELARLEEELKEILDRVRDLHRRLAEEIRKILEESKKLNEELEDRLRKDGDVEELLELLERVHATDVRLLRELLKLLKKVHEDVVSLLERLLELLKRVLDRIVEELGLSDKELEKLLEDLEREIRRLKMSCAQESDRLEEKIRKIKRELD

SEQ ID NO: 27801 - protein, 226 aa, Artificial Sequence
  Synthetic
SAKETIRKLIEENKDIIRKLAEKLKRLLEESERIAEEALRLIKELLERIERALRRVGSGIDEELLKELEKELARLEEELKEILDRVRDLHRRLAEEIRKILEESKKLNEELEDRLRKDGDVEELLELLERVHATDVRLLRELLKLLKKVHEDVVSLLERLLELLKRVLDRIVEELGLSDKELEKLLEDLEREIRRLAKRLKELAMSCAQESRKIKRELDDLSARLR

SEQ ID NO: 27802 - protein, 230 aa, Artificial Sequence
  Synthetic
SAKETIRKLIEENKDIIRKLAEKLKRLLEESERIAEEALRLIKELLERIERALRRVGSGIDEELLKELEKELARLEEELKEILDRVRDLHRRLAEEIRKILEESKKLNEELEDRLRKDGDVEELLELLERVHATDVRLLRELLKLLKKVHEDVVSLLERLLELLKRVLDRIVEELGLSDKELEKLLEDLEREIRRLAKRLKELSDRLAMSCAQESRELDDLSARLREKIE

SEQ ID NO: 27803 - protein, 219 aa, Artificial Sequence; identical to SEQ ID NO: 27800
  Synthetic

SEQ ID NO: 27804 - protein, 230 aa, Artificial Sequence
  Synthetic
SAKETIRKLIEENKDIIRKLAEKLKRLLEESERIAEEALRLIKELLERIERALRRVGSGIDEELLKELEKELARLEEELKEILDRVRDLHRRLAEEIRKILEESKKLNEELEDRLRKDGDVEELLELLERVHATDVRLLRELLKLLKKVHEDVVSLLERLLELLKRVLDRIVEELGLSDKELEKLLEDLEREIRRLAKRLKELSDRLIMSCAQESRELDDLSARLREKIE

SEQ ID NO: 27805 - protein, 230 aa, Artificial Sequence
  Synthetic
SKEDKARELEKRLRDNLKKLEEVVRELAEVLKRNLEKLRRLAEELLRALKRLLDKLRAGGLPKDELEDLRREVEDVLRRLEDLLRKLKKANDESLTRLEELLRRAEEENRRVLTTLRELLRGNGDDRDLARLVARLVEANNRALEELLRLVAKNVEDNNRVLEELLRLVKELAKRLLGRIRDEDLVRDIRRELKELEERARKILRDLKMSCAQESKRIRDIIREDREELE

SEQ ID NO: 27806 - protein, 237 aa, Artificial Sequence
  Synthetic
SKEDKARELEKRLRDNLKKLEEVVRELAEVLKRNLEKLRRLAEELLRALKRLLDKLRAGGLPKDELEDLRREVEDVLRRLEDLLRKLKKANDESLTRLEELLRRAEEENRRVLTTLRELLRGNGDDRDLARLVARLVEANNRALEELLRLVAKNVEDNNRVLEELLRLVKELAKRLLGRIRDEDLVRDIRRELKELEERARKILRDDERDLRALEMSCAQESREDREELERLKERAR

SEQ ID NO: 27807 - protein, 223 aa, Artificial Sequence
  Synthetic
SKEDKARELEKRLRDNLKKLEEVVRELAEVLKRNLEKLRRLAEELLRALKRLLDKLRAGGLPKDELEDLRREVEDVLRRLEDLLRKLKKANDESLTRLEELLRRAEEENRRVLTTLRELLRGNGDDRDLARLVARLVEANNRALEELLRLVAKNVEDNNRVLEELLRLVKELAKRLLGRIRDEDLVRDIRRELKELEERLKMSCAQESRDLRALEKRIRDIIR

SEQ ID NO: 27808 - protein, 239 aa, Artificial Sequence
  Synthetic
KREDILKKLEDIIRDIIDKLRRILEKVKRLNEDIIREIKRLLDESLKTLEDLLKRIADKSRDRELEDILRRVLEKLRRSLDKLRDTLRKLKEETDTVLERAERTLKELKDRLEKLLRDGEKVSEEDLVEALKALIDELRKVLEDVIRVSKELVERLLRALREHLETNKRLVKELLDALRKTTGDDEEIKRLKEELERRHRRLEEEVERVARELEKLHMSCAQESRRVAEELKKLLKKLR

SEQ ID NO: 27809 - protein, 239 aa, Artificial Sequence
  Synthetic
KREDILKKLEDIIRDIIDKLRRILEKVKRLNEDIIREIKRLLDESLKTLEDLLKRIADKSRDRELEDILRRVLEKLRRSLDKLRDTLRKLKEETDTVLERAERTLKELKDRLEKLLRDGEKVSEEDLVEALKALIDELRKVLEDVIRVSKELVERLLRALREHLETNKRLVKELLDALRKTTGDDEEIKRLKEELERRHRRLEEEVERVARELEKLLMSCAQESRRVAEELKKLLKKLR

SEQ ID NO: 27810 - protein, 221 aa, Artificial Sequence
  Synthetic
SAEETVERLLEEARKRHEEIIKKAKELLDRAREEHERIIREAEKLLEEIKKRVDELVRDGQPAEEVLRDLERVVEEILEVLRRLLDANRRVVDDVLRVLEELLRVNEEVNRRIIETIGLPEEVVEELKEENKRLRDRLDKLVKDLKKTNKEIEDKLRKLAEELKEELERIADRIRKTGTDRKTLLREIEKLLKTLEDLAMSCAQESEKTLKELEEILKDLV

SEQ ID NO: 27811 - protein, 225 aa, Artificial Sequence
  Synthetic
SAEETVERLLEEARKRHEEIIKKAKELLDRAREEHERIIREAEKLLEEIKKRVDELVRDGQPAEEVLRDLERVVEEILEVLRRLLDANRRVVDDVLRVLEELLRVNEEVNRRIIETIGLPEEVVEELKEENKRLRDRLDKLVKDLKKTNKEIEDKLRKLAEELKEELERIADRIRKTGTDRKTLLREIEKLLKTLEDILRDLGMSCAQESKELEEILKDLVDKAR

SEQ ID NO: 27812 - protein, 228 aa, Artificial Sequence
  Synthetic
SAEETVERLLEEARKRHEEIIKKAKELLDRAREEHERIIREAEKLLEEIKKRVDELVRDGQPAEEVLRDLERVVEEILEVLRRLLDANRRVVDDVLRVLEELLRVNEEVNRRIIETIGLPEEVVEELKEENKRLRDRLDKLVKDLKKTNKEIEDKLRKLAEELKEELERIADRIRKTGTDRKTLLREIEKLLKTLEDILRDLLRLVMSCAQESEEILKDLVDKARENL

SEQ ID NO: 27813 - protein, 229 aa, Artificial Sequence
  Synthetic
SAEETVERLLEEARKRHEEIIKKAKELLDRAREEHERIIREAEKLLEEIKKRVDELVRDGQPAEEVLRDLERVVEEILEVLRRLLDANRRVVDDVLRVLEELLRVNEEVNRRIIETIGLPEEVVEELKEENKRLRDRLDKLVKDLKKTNKEIEDKLRKLAEELKEELERIADRIRKTGTDRKTLLREIEKLLKTLEDILRDLLRLLLMSCAQESEILKDLVDKARENLK

SEQ ID NO: 27814 - protein, 221 aa, Artificial Sequence; identical to SEQ ID NO: 27810
  Synthetic

SEQ ID NO: 27815 - protein, 225 aa, Artificial Sequence; identical to SEQ ID NO: 27811
  Synthetic

SEQ ID NO: 27816 - protein, 228 aa, Artificial Sequence; identical to SEQ ID NO: 27812
  Synthetic

SEQ ID NO: 27817 - protein, 229 aa, Artificial Sequence; identical to SEQ ID NO: 27813
  Synthetic

SEQ ID NO: 27818 - protein, 232 aa, Artificial Sequence
  Synthetic
SAEETVERLLEEARKRHEEIIKKAKELLDRAREEHERIIREAEKLLEEIKKRVDELVRDGQPAEEVLRDLERVVEEILEVLRRLLDANRRVVDDVLRVLEELLRVNEEVNRRIIETIGLPEEVVEELKEENKRLRDRLDKLVKDLKKTNKEIEDKLRKLAEELKEELERIADRIRKTGTDRKTLLREIEKLLKTLEDILRDLLRLVEKLLMSCAQESKDLVDKARENLKRLR

SEQ ID NO: 27819 - protein, 224 aa, Artificial Sequence
  Synthetic
SEKEELKRLLDKLLKELKRLSDELKATIDKILKILKEVSEEVKRTADELLDAIRRGGVDEEVLREIKREIEEIEKKLRKVNKEIEDEIREIKKKLDEVDDKITKEVEKIKEALDKGGVDAKEVIKALKEILKEHADVFEDVLRRLKEIIKRHRDVVKEVLEELRKILEKVAEVLKRQGRSEDELRKVEEDLKRLEDKLKKLLMSCAQESRELEETLDDLLRKYE

SEQ ID NO: 27820 - protein, 224 aa, Artificial Sequence; identical to SEQ ID NO: 27819
  Synthetic

SEQ ID NO: 27821 - protein, 231 aa, Artificial Sequence
  Synthetic
SEKEELKRLLDKLLKELKRLSDELKATIDKILKILKEVSEEVKRTADELLDAIRRGGVDEEVLREIKREIEEIEKKLRKVNKEIEDEIREIKKKLDEVDDKITKEVEKIKEALDKGGVDAKEVIKALKEILKEHADVFEDVLRRLKEIIKRHRDVVKEVLEELRKILEKVAEVLKRQGRSEDELRKVEEDLKRLEDKLKKLLEDYEKLVMSCAQESDDLLRKYEETLRRLE

SEQ ID NO: 27822 - protein, 232 aa, Artificial Sequence
  Synthetic
SEKEELKRLLDKLLKELKRLSDELKATIDKILKILKEVSEEVKRTADELLDAIRRGGVDEEVLREIKREIEEIEKKLRKVNKEIEDEIREIKKKLDEVDDKITKEVEKIKEALDKGGVDAKEVIKALKEILKEHADVFEDVLRRLKEIIKRHRDVVKEVLEELRKILEKVAEVLKRQGRSEDELRKVEEDLKRLEDKLKKLLEDYEKKLTMSCAQESDLLRKYEETLRRLEK

SEQ ID NO: 27823 - protein, 235 aa, Artificial Sequence
  Synthetic
SEKEELKRLLDKLLKELKRLSDELKATIDKILKILKEVSEEVKRTADELLDAIRRGGVDEEVLREIKREIEEIEKKLRKVNKEIEDEIREIKKKLDEVDDKITKEVEKIKEALDKGGVDAKEVIKALKEILKEHADVFEDVLRRLKEIIKRHRDVVKEVLEELRKILEKVAEVLKRQGRSEDELRKVEEDLKRLEDKLKKLLEDYEKKVRELEMSCAQESRKYEETLRRLEKELE

SEQ ID NO: 27824 - protein, 229 aa, Artificial Sequence
  Synthetic
SDAERLVKKIADSLRAYEDLLRKLVERIRDLLRAYEEELRKLLTEIEKTLEDVRDVLRRGNVDERAKEVAKRLVEAVKSLIEIVKRILEKTARVVKKLEDLLRRAAELNRDVVEKILEIIKRGGPEDDFRRIVRRLEELHREVEDAVRKLVEDLKRLHREVVEELADIIRKLDKLLAEVERDIDLGDLLEALRRLVERLKRLIERLAMSCAQESKKLLELLEEALRANR

SEQ ID NO: 27825 - protein, 232 aa, Artificial Sequence
  Synthetic
SDAERLVKKIADSLRAYEDLLRKLVERIRDLLRAYEEELRKLLTEIEKTLEDVRDVLRRGNVDERAKEVAKRLVEAVKSLIEIVKRILEKTARVVKKLEDLLRRAAELNRDVVEKILEIIKRGGPEDDFRRIVRRLEELHREVEDAVRKLVEDLKRLHREVVEELADIIRKLDKLLAEVERDIDLGDLLEALRRLVERLKRLIERVLKLNMSCAQESLELLEEALRANRRLV

SEQ ID NO: 27826 - protein, 233 aa, Artificial Sequence
  Synthetic
SDAERLVKKIADSLRAYEDLLRKLVERIRDLLRAYEEELRKLLTEIEKTLEDVRDVLRRGNVDERAKEVAKRLVEAVKSLIEIVKRILEKTARVVKKLEDLLRRAAELNRDVVEKILEIIKRGGPEDDFRRIVRRLEELHREVEDAVRKLVEDLKRLHREVVEELADIIRKLDKLLAEVERDIDLGDLLEALRRLVERLKRLIERVLKLLAMSCAQESELLEEALRANRRLVE

SEQ ID NO: 27827 - protein, 236 aa, Artificial Sequence
  Synthetic
SDAERLVKKIADSLRAYEDLLRKLVERIRDLLRAYEEELRKLLTEIEKTLEDVRDVLRRGNVDERAKEVAKRLVEAVKSLIEIVKRILEKTARVVKKLEDLLRRAAELNRDVVEKILEIIKRGGPEDDFRRIVRRLEELHREVEDAVRKLVEDLKRLHREVVEELADIIRKLDKLLAEVERDIDLGDLLEALRRLVERLKRLIERVLKLNRELVMSCAQESEEALRANRRLVEDIL

SEQ ID NO: 27828 - protein, 239 aa, Artificial Sequence
  Synthetic
SDAERLVKKIADSLRAYEDLLRKLVERIRDLLRAYEEELRKLLTEIEKTLEDVRDVLRRGNVDERAKEVAKRLVEAVKSLIEIVKRILEKTARVVKKLEDLLRRAAELNRDVVEKILEIIKRGGPEDDFRRIVRRLEELHREVEDAVRKLVEDLKRLHREVVEELADIIRKLDKLLAEVERDIDLGDLLEALRRLVERLKRLIERVLKLNRELVKLLMSCAQESLRANRRLVEDILKIA

SEQ ID NO: 27829 - protein, 240 aa, Artificial Sequence
  Synthetic
SDAERLVKKIADSLRAYEDLLRKLVERIRDLLRAYEEELRKLLTEIEKTLEDVRDVLRRGNVDERAKEVAKRLVEAVKSLIEIVKRILEKTARVVKKLEDLLRRAAELNRDVVEKILEIIKRGGPEDDFRRIVRRLEELHREVEDAVRKLVEDLKRLHREVVEELADIIRKLDKLLAEVERDIDLGDLLEALRRLVERLKRLIERVLKLNRELVKKLAMSCAQESRANRRLVEDILKIAD

SEQ ID NO: 27830 - protein, 243 aa, Artificial Sequence
  Synthetic
SDAERLVKKIADSLRAYEDLLRKLVERIRDLLRAYEEELRKLLTEIEKTLEDVRDVLRRGNVDERAKEVAKRLVEAVKSLIEIVKRILEKTARVVKKLEDLLRRAAELNRDVVEKILEIIKRGGPEDDFRRIVRRLEELHREVEDAVRKLVEDLKRLHREVVEELADIIRKLDKLLAEVERDIDLGDLLEALRRLVERLKRLIERVLKLNRELVKKLLELAMSCAQESRRLVEDILKIADEAR

SEQ ID NO: 27831 - protein, 244 aa, Artificial Sequence
  Synthetic
SDAERLVKKIADSLRAYEDLLRKLVERIRDLLRAYEEELRKLLTEIEKTLEDVRDVLRRGNVDERAKEVAKRLVEAVKSLIEIVKRILEKTARVVKKLEDLLRRAAELNRDVVEKILEIIKRGGPEDDFRRIVRRLEELHREVEDAVRKLVEDLKRLHREVVEELADIIRKLDKLLAEVERDIDLGDLLEALRRLVERLKRLIERVLKLNRELVKKLLELLKMSCAQESRLVEDILKIADEARK

SEQ ID NO: 27832 - protein, 229 aa, Artificial Sequence
  Synthetic
SDAERLVKKIADSLRAYEDLLRKLVERIRDLLRAYEEELRKLLTEIEKTLEDVRDVLRRGNVDERAKEVAKRLVEAVKSLIEIVKRILEKTARVVKKLEDLLRRAAELNRDVVEKILEIIKRGGPEDDFRRIVRRLEELHREVEDAVRKLVEDLKRLHREVVEELADIIRKLDKLLAEVERDIDLGDLLEALRRLVERLKRLIERLGMSCAQESKKLLELLEEALRANR

SEQ ID NO: 27833 - protein, 233 aa, Artificial Sequence
  Synthetic
SDAERLVKKIADSLRAYEDLLRKLVERIRDLLRAYEEELRKLLTEIEKTLEDVRDVLRRGNVDERAKEVAKRLVEAVKSLIEIVKRILEKTARVVKKLEDLLRRAAELNRDVVEKILEIIKRGGPEDDFRRIVRRLEELHREVEDAVRKLVEDLKRLHREVVEELADIIRKLDKLLAEVERDIDLGDLLEALRRLVERLKRLIERVLKLLGMSCAQESELLEEALRANRRLVE

SEQ ID NO: 27834 - protein, 236 aa, Artificial Sequence; identical to SEQ ID NO: 27827
  Synthetic

SEQ ID NO: 27835 - protein, 239 aa, Artificial Sequence
  Synthetic
SDAERLVKKIADSLRAYEDLLRKLVERIRDLLRAYEEELRKLLTEIEKTLEDVRDVLRRGNVDERAKEVAKRLVEAVKSLIEIVKRILEKTARVVKKLEDLLRRAAELNRDVVEKILEIIKRGGPEDDFRRIVRRLEELHREVEDAVRKLVEDLKRLHREVVEELADIIRKLDKLLAEVERDIDLGDLLEALRRLVERLKRLIERVLKLNRELVKLCMSCAQESLRANRRLVEDILKIA

SEQ ID NO: 27836 - protein, 240 aa, Artificial Sequence
  Synthetic
SDAERLVKKIADSLRAYEDLLRKLVERIRDLLRAYEEELRKLLTEIEKTLEDVRDVLRRGNVDERAKEVAKRLVEAVKSLIEIVKRILEKTARVVKKLEDLLRRAAELNRDVVEKILEIIKRGGPEDDFRRIVRRLEELHREVEDAVRKLVEDLKRLHREVVEELADIIRKLDKLLAEVERDIDLGDLLEALRRLVERLKRLIERVLKLNRELVKKLNMSCAQESRANRRLVEDILKIAD

SEQ ID NO: 27837 - protein, 243 aa, Artificial Sequence
  Synthetic
SDAERLVKKIADSLRAYEDLLRKLVERIRDLLRAYEEELRKLLTEIEKTLEDVRDVLRRGNVDERAKEVAKRLVEAVKSLIEIVKRILEKTARVVKKLEDLLRRAAELNRDVVEKILEIIKRGGPEDDFRRIVRRLEELHREVEDAVRKLVEDLKRLHREVVEELADIIRKLDKLLAEVERDIDLGDLLEALRRLVERLKRLIERVLKLNRELVKKLLELLMSCAQESRRLVEDILKIADEAR

SEQ ID NO: 27838 - protein, 235 aa, Artificial Sequence
  Synthetic
SATERVLDLARDLIRILLEIHKRALKLIAELVSKLLKIHEDVLKLSEELVEELLEIVKRGLPREDLLRALKELLEKIEDVVRDIERRHRDLLREAEEVVEKLKREHEEVKERIERAVKKLAEDGVDKDKLKELVDVLEEILRLSKTTLEELVKALRDVIRASLEALKENLRILRKIIRELEGLEGVDEDTLRRVLERIREEVERVKEKHRRLLMSCAQESEELRARSADLLEDIK

SEQ ID NO: 27839 - protein, 239 aa, Artificial Sequence
  Synthetic
SATERVLDLARDLIRILLEIHKRALKLIAELVSKLLKIHEDVLKLSEELVEELLEIVKRGLPREDLLRALKELLEKIEDVVRDIERRHRDLLREAEEVVEKLKREHEEVKERIERAVKKLAEDGVDKDKLKELVDVLEEILRLSKTTLEELVKALRDVIRASLEALKENLRILRKIIRELEGLEGVDEDTLRRVLERIREEVERVKEKHRRLLEELKMSCAQESARSADLLEDIKRKVR

SEQ ID NO: 27840 - protein, 242 aa, Artificial Sequence
  Synthetic
SATERVLDLARDLIRILLEIHKRALKLIAELVSKLLKIHEDVLKLSEELVEELLEIVKRGLPREDLLRALKELLEKIEDVVRDIERRHRDLLREAEEVVEKLKREHEEVKERIERAVKKLAEDGVDKDKLKELVDVLEEILRLSKTTLEELVKALRDVIRASLEALKENLRILRKIIRELEGLEGVDEDTLRRVLERIREEVERVKEKHRRLLEELKKLLMSCAQESADLLEDIKRKVRELE

SEQ ID NO: 27841 - protein, 239 aa, Artificial Sequence; identical to SEQ ID NO: 27839
  Synthetic

SEQ ID NO: 27842 - protein, 242 aa, Artificial Sequence; identical to SEQ ID NO: 27840
  Synthetic

SEQ ID NO: 27843 - protein, 246 aa, Artificial Sequence
  Synthetic
SATERVLDLARDLIRILLEIHKRALKLIAELVSKLLKIHEDVLKLSEELVEELLEIVKRGLPREDLLRALKELLEKIEDVVRDIERRHRDLLREAEEVVEKLKREHEEVKERIERAVKKLAEDGVDKDKLKELVDVLEEILRLSKTTLEELVKALRDVIRASLEALKENLRILRKIIRELEGLEGVDEDTLRRVLERIREEVERVKEKHRRLLEELKKLLEELAMSCAQESEDIKRKVRELEEKTR

SEQ ID NO: 27844 - protein, 229 aa, Artificial Sequence
  Synthetic
SAEETLRRITEESKRVLEEITKKYEDLERESREVLRKLREDLDRIKRELEDVLTKGGDDKDEVLTVLEKVLDELLKLHRENLRVIKELLRKVLEVDRENLEVLKRLLEKARDLLRRSGRDEKDLKKLEDELRKVKEELEKKHEASKRDIEDLERELDKVTEEVERLLRKLKEELRRAAEGSDEDRERLARLLKALADKLIRVLEELLMSCAQESRKIIKFARENLERNR

SEQ ID NO: 27845 - protein, 236 aa, Artificial Sequence
  Synthetic
SAEETLRRITEESKRVLEEITKKYEDLERESREVLRKLREDLDRIKRELEDVLTKGGDDKDEVLTVLEKVLDELLKLHRENLRVIKELLRKVLEVDRENLEVLKRLLEKARDLLRRSGRDEKDLKKLEDELRKVKEELEKKHEASKRDIEDLERELDKVTEEVERLLRKLKEELRRAAEGSDEDRERLARLLKALADKLIRVLEEILKINEELNMSCAQESRENLERNRRVNKKVI

SEQ ID NO: 27846 - protein, 237 aa, Artificial Sequence
  Synthetic
SAEETLRRITEESKRVLEEITKKYEDLERESREVLRKLREDLDRIKRELEDVLTKGGDDKDEVLTVLEKVLDELLKLHRENLRVIKELLRKVLEVDRENLEVLKRLLEKARDLLRRSGRDEKDLKKLEDELRKVKEELEKKHEASKRDIEDLERELDKVTEEVERLLRKLKEELRRAAEGSDEDRERLARLLKALADKLIRVLEEILKINEELLKMSCAQESENLERNRRVNKKVIE

SEQ ID NO: 27847 - protein, 240 aa, Artificial Sequence
  Synthetic
SAEETLRRITEESKRVLEEITKKYEDLERESREVLRKLREDLDRIKRELEDVLTKGGDDKDEVLTVLEKVLDELLKLHRENLRVIKELLRKVLEVDRENLEVLKRLLEKARDLLRRSGRDEKDLKKLEDELRKVKEELEKKHEASKRDIEDLERELDKVTEEVERLLRKLKEELRRAAEGSDEDRERLARLLKALADKLIRVLEEILKINEELNRKLIMSCAQESERNRRVNKKVIEVLR

SEQ ID NO: 27848 - protein, 243 aa, Artificial Sequence
  Synthetic
SAEETLRRITEESKRVLEEITKKYEDLERESREVLRKLREDLDRIKRELEDVLTKGGDDKDEVLTVLEKVLDELLKLHRENLRVIKELLRKVLEVDRENLEVLKRLLEKARDLLRRSGRDEKDLKKLEDELRKVKEELEKKHEASKRDIEDLERELDKVTEEVERLLRKLKEELRRAAEGSDEDRERLARLLKALADKLIRVLEEILKINEELNRKIIKLAMSCAQESRRVNKKVIEVLREAA

SEQ ID NO: 27849 - protein, 236 aa, Artificial Sequence; identical to SEQ ID NO: 27845
  Synthetic

SEQ ID NO: 27850 - protein, 240 aa, Artificial Sequence
  Synthetic
SAEETLRRITEESKRVLEEITKKYEDLERESREVLRKLREDLDRIKRELEDVLTKGGDDKDEVLTVLEKVLDELLKLHRENLRVIKELLRKVLEVDRENLEVLKRLLEKARDLLRRSGRDEKDLKKLEDELRKVKEELEKKHEASKRDIEDLERELDKVTEEVERLLRKLKEELRRAAEGSDEDRERLARLLKALADKLIRVLEEILKINEELNRKLVMSCAQESERNRRVNKKVIEVLR

SEQ ID NO: 27851 - protein, 243 aa, Artificial Sequence; identical to SEQ ID NO: 27848
  Synthetic

SEQ ID NO: 27852 - protein, 235 aa, Artificial Sequence
  Synthetic
STEEILKRVKEILDELAKELRDIIRESLRTIEELLDELRRILEESERTLEELVKTIKDGVKDSEELLRRLKRLLEDLRRAHEELLKRLKEAVDEHRDRLRKILEELERVLKELRKRIEELRRSGDRISEKDVLRKLEEVLRKALEILERLLKKIRESARELLKIIEEVLDANIKVMEEALKTIKELLKDGPDEVKRRLEEKERRIRTRYEELKMSCAQESKDYEDKLREIEKKVR

SEQ ID NO: 27853 - protein, 235 aa, Artificial Sequence
  Synthetic
STEEILKRVKEILDELAKELRDIIRESLRTIEELLDELRRILEESERTLEELVKTIKDGVKDSEELLRRLKRLLEDLRRAHEELLKRLKEAVDEHRDRLRKILEELERVLKELRKRIEELRRSGDRISEKDVLRKLEEVLRKALEILERLLKKIRESARELLKIIEEVLDANIKVMEEALKTIKELLKDGPDEVKRRLEEKERRIRTRYEELRMSCAQESKDYEDKLREIEKKVR

SEQ ID NO: 27854 - protein, 249 aa, Artificial Sequence
  Synthetic
STEEILKRVKEILDELAKELRDIIRESLRTIEELLDELRRILEESERTLEELVKTIKDGVKDSEELLRRLKRLLEDLRRAHEELLKRLKEAVDEHRDRLRKILEELERVLKELRKRIEELRRSGDRISEKDVLRKLEEVLRKALEILERLLKKIRESARELLKIIEEVLDANIKVMEEALKTIKELLKDGPDEVKRRLEEKERRIRTRYEELRRRLRKRVKDYEDLMMSCAQESRRDAERIEEELERAK

SEQ ID NO: 27855 - protein, 232 aa, Artificial Sequence
  Synthetic
SEKEELLKLIKRVIELLKRVLEEHLRLVEDVIRRLKELLDSNEKIVREVIEDLKRLLDEVRGDKEELDRIKEKLEEVLERYKRRLEEIKRDLERMLEDYKRELKRIEEDLRRVLEEVERIATRGEGPAEALIDKLRKILERALRELDKLSKKLDELLKKVLEELEKSNREIDKLLKDVLRRVEEGGASEDLLRKAKKVITEVREKLKRLLMSCAQESEDVKRKSARILEEAR

SEQ ID NO: 27856 - protein, 239 aa, Artificial Sequence
  Synthetic
SEKEELLKLIKRVIELLKRVLEEHLRLVEDVIRRLKELLDSNEKIVREVIEDLKRLLDEVRGDKEELDRIKEKLEEVLERYKRRLEEIKRDLERMLEDYKRELKRIEEDLRRVLEEVERIATRGEGPAEALIDKLRKILERALRELDKLSKKLDELLKKVLEELEKSNREIDKLLKDVLRRVEEGGASEDLLRKAKKVITEVREKLKRNLEDVRRLIMSCAQESARILEEARRLIEEVE

SEQ ID NO: 27857 - protein, 243 aa, Artificial Sequence
  Synthetic
SEKEELLKLIKRVIELLKRVLEEHLRLVEDVIRRLKELLDSNEKIVREVIEDLKRLLDEVRGDKEELDRIKEKLEEVLERYKRRLEEIKRDLERMLEDYKRELKRIEEDLRRVLEEVERIATRGEGPAEALIDKLRKILERALRELDKLSKKLDELLKKVLEELEKSNREIDKLLKDVLRRVEEGGASEDLLRKAKKVITEVREKLKRNLEDVRRVIEDLKMSCAQESEEARRLIEEVERELE

SEQ ID NO: 27858 - protein, 246 aa, Artificial Sequence
  Synthetic
SEKEELLKLIKRVIELLKRVLEEHLRLVEDVIRRLKELLDSNEKIVREVIEDLKRLLDEVRGDKEELDRIKEKLEEVLERYKRRLEEIKRDLERMLEDYKRELKRIEEDLRRVLEEVERIATRGEGPAEALIDKLRKILERALRELDKLSKKLDELLKKVLEELEKSNREIDKLLKDVLRRVEEGGASEDLLRKAKKVITEVREKLKRNLEDVRRVIEDVKRLAMSCAQESRRLIEEVERELEKIR

SEQ ID NO: 27859 - protein, 232 aa, Artificial Sequence; identical to SEQ ID NO: 27855
  Synthetic

SEQ ID NO: 27860 - protein, 236 aa, Artificial Sequence
  Synthetic
SEKEELLKLIKRVIELLKRVLEEHLRLVEDVIRRLKELLDSNEKIVREVIEDLKRLLDEVRGDKEELDRIKEKLEEVLERYKRRLEEIKRDLERMLEDYKRELKRIEEDLRRVLEEVERIATRGEGPAEALIDKLRKILERALRELDKLSKKLDELLKKVLEELEKSNREIDKLLKDVLRRVEEGGASEDLLRKAKKVITEVREKLKRNLEDLAMSCAQESRKSARILEEARRLIE

SEQ ID NO: 27861 - protein, 239 aa, Artificial Sequence; identical to SEQ ID NO: 27856
  Synthetic

SEQ ID NO: 27862 - protein, 246 aa, Artificial Sequence; identical to SEQ ID NO: 27858
  Synthetic

SEQ ID NO: 27863 - protein, 247 aa, Artificial Sequence
  Synthetic
SEKEELLKLIKRVIELLKRVLEEHLRLVEDVIRRLKELLDSNEKIVREVIEDLKRLLDEVRGDKEELDRIKEKLEEVLERYKRRLEEIKRDLERMLEDYKRELKRIEEDLRRVLEEVERIATRGEGPAEALIDKLRKILERALRELDKLSKKLDELLKKVLEELEKSNREIDKLLKDVLRRVEEGGASEDLLRKAKKVITEVREKLKRNLEDVRRVIEDVKRKLKMSCAQESRLIEEVERELEKIRK

SEQ ID NO: 27864 - protein, 224 aa, Artificial Sequence
  Synthetic
SRAERIKRALEEHIRKLKEITDEVRKTNEELLELTRRILEEAKKANEELVKKIREAGDKSKELEEEIRKLIEESERIVEELEERSKELLKRSREEVEEWRRRSEELLRRLEAILRGVKDEKELVERAVKILRDDSRIAKEILRRNLRLIEENLERLKEIIERNLDLLRRLLELLKRAGVDEEALKELEEKLDRYRRKLEDLLMSCAQESEDYKRKVKKLEEENE

SEQ ID NO: 27865 - protein, 228 aa, Artificial Sequence
  Synthetic
SRAERIKRALEEHIRKLKEITDEVRKTNEELLELTRRILEEAKKANEELVKKIREAGDKSKELEEEIRKLIEESERIVEELEERSKELLKRSREEVEEWRRRSEELLRRLEAILRGVKDEKELVERAVKILRDDSRIAKEILRRNLRLIEENLERLKEIIERNLDLLRRLLELLKRAGVDEEALKELEEKLDRYRRKLEDLLRKLAMSCAQESRKVKKLEEENEELLK

SEQ ID NO: 27866 - protein, 224 aa, Artificial Sequence; identical to SEQ ID NO: 27864
  Synthetic

SEQ ID NO: 27867 - protein, 228 aa, Artificial Sequence; identical to SEQ ID NO: 27865
  Synthetic

SEQ ID NO: 27868 - protein, 230 aa, Artificial Sequence
  Synthetic
SEAEKIREALETNLRLLEELIKRLKEILDTHNELLRRVIETLERLLKELLELLEEGGLDEEVLREVKRLVDELRKEARRVLDEHEKLVRKIKKEAEDVARESEEIIKEVEDKLKGLDREELLERVRRVLKKSDDLIAELVRRALKILEELTRLLAELLKKVVEILRRIVELVERVLTKKGAPKEDLERLRRKVEELEDRLRRLLEKLKMSCAQESRELERILDRYARESE

SEQ ID NO: 27869 - protein, 233 aa, Artificial Sequence
  Synthetic
SEAEKIREALETNLRLLEELIKRLKEILDTHNELLRRVIETLERLLKELLELLEEGGLDEEVLREVKRLVDELRKEARRVLDEHEKLVRKIKKEAEDVARESEEIIKEVEDKLKGLDREELLERVRRVLKKSDDLIAELVRRALKILEELTRLLAELLKKVVEILRRIVELVERVLTKKGAPKEDLERLRRKVEELEDRLRRLLEKLARLAMSCAQESERILDRYARESEELD

SEQ ID NO: 27870 - protein, 234 aa, Artificial Sequence
  Synthetic
SEAEKIREALETNLRLLEELIKRLKEILDTHNELLRRVIETLERLLKELLELLEEGGLDEEVLREVKRLVDELRKEARRVLDEHEKLVRKIKKEAEDVARESEEIIKEVEDKLKGLDREELLERVRRVLKKSDDLIAELVRRALKILEELTRLLAELLKKVVEILRRIVELVERVLTKKGAPKEDLERLRRKVEELEDRLRRLLEKLARDLKMSCAQESRILDRYARESEELDR

SEQ ID NO: 27871 - protein, 237 aa, Artificial Sequence
  Synthetic
SEAEKIREALETNLRLLEELIKRLKEILDTHNELLRRVIETLERLLKELLELLEEGGLDEEVLREVKRLVDELRKEARRVLDEHEKLVRKIKKEAEDVARESEEIIKEVEDKLKGLDREELLERVRRVLKKSDDLIAELVRRALKILEELTRLLAELLKKVVEILRRIVELVERVLTKKGAPKEDLERLRRKVEELEDRLRRLLEKLARDSAELMMSCAQESDRYARESEELDRRLA

SEQ ID NO: 27872 - protein, 230 aa, Artificial Sequence
  Synthetic
SEAEKIREALETNLRLLEELIKRLKEILDTHNELLRRVIETLERLLKELLELLEEGGLDEEVLREVKRLVDELRKEARRVLDEHEKLVRKIKKEAEDVARESEEIIKEVEDKLKGLDREELLERVRRVLKKSDDLIAELVRRALKILEELTRLLAELLKKVVEILRRIVELVERVLTKKGAPKEDLERLRRKVEELEDRLRRLLEKLLMSCAQESRELERILDRYARESE

SEQ ID NO: 27873 - protein, 233 aa, Artificial Sequence; identical to SEQ ID NO: 27869
  Synthetic

SEQ ID NO: 27874 - protein, 234 aa, Artificial Sequence; identical to SEQ ID NO: 27870
  Synthetic

SEQ ID NO: 27875 - protein, 237 aa, Artificial Sequence; identical to SEQ ID NO: 27871
  Synthetic

SEQ ID NO: 27876 - protein, 233 aa, Artificial Sequence
  Synthetic
SAEEELEKLVRKVEEDLKRLEEESERIKKEIKDTLRAIRKRSEDLKRKVKELLRRLEEEGRRVSLEEAIKIIKEILDELAKVNEDIIRIIKELLKRLVDTNRRVIETIDRILKKLVDDLRRGNLPEDKLREVERELRELKKELEEIVRESEKMLKELEDKLREIVRESRELLEKLRRDLKRIKDGNLSADEALEMLKRLLDKALKVHEDLVMSCAQESDEVLKVHEESLRKLL

SEQ ID NO: 27877 - protein, 236 aa, Artificial Sequence
  Synthetic
SAEEELEKLVRKVEEDLKRLEEESERIKKEIKDTLRAIRKRSEDLKRKVKELLRRLEEEGRRVSLEEAIKIIKEILDELAKVNEDIIRIIKELLKRLVDTNRRVIETIDRILKKLVDDLRRGNLPEDKLREVERELRELKKELEEIVRESEKMLKELEDKLREIVRESRELLEKLRRDLKRIKDGNLSADEALEMLKRLLDKALKVHEDVLRLLMSCAQESLKVHEESLRKLLTLA

SEQ ID NO: 27878 - protein, 237 aa, Artificial Sequence
  Synthetic
SAEEELEKLVRKVEEDLKRLEEESERIKKEIKDTLRAIRKRSEDLKRKVKELLRRLEEEGRRVSLEEAIKIIKEILDELAKVNEDIIRIIKELLKRLVDTNRRVIETIDRILKKLVDDLRRGNLPEDKLREVERELRELKKELEEIVRESEKMLKELEDKLREIVRESRELLEKLRRDLKRIKDGNLSADEALEMLKRLLDKALKVHEDVLRKLVMSCAQESKVHEESLRKLLTLAA

SEQ ID NO: 27879 - protein, 240 aa, Artificial Sequence
  Synthetic
SAEEELEKLVRKVEEDLKRLEEESERIKKEIKDTLRAIRKRSEDLKRKVKELLRRLEEEGRRVSLEEAIKIIKEILDELAKVNEDIIRIIKELLKRLVDTNRRVIETIDRILKKLVDDLRRGNLPEDKLREVERELRELKKELEEIVRESEKMLKELEDKLREIVRESRELLEKLRRDLKRIKDGNLSADEALEMLKRLLDKALKVHEDVLRKLVELVMSCAQESEESLRKLLTLAAKVL

SEQ ID NO: 27880 - protein, 244 aa, Artificial Sequence
  Synthetic
SAEEELEKLVRKVEEDLKRLEEESERIKKEIKDTLRAIRKRSEDLKRKVKELLRRLEEEGRRVSLEEAIKIIKEILDELAKVNEDIIRIIKELLKRLVDTNRRVIETIDRILKKLVDDLRRGNLPEDKLREVERELRELKKELEEIVRESEKMLKELEDKLREIVRESRELLEKLRRDLKRIKDGNLSADEALEMLKRLLDKALKVHEDVLRKLVELVDELLMSCAQESRKLLTLAAKVLEVLR

SEQ ID NO: 27881 - protein, 248 aa, Artificial Sequence
  Synthetic
SAEEELEKLVRKVEEDLKRLEEESERIKKEIKDTLRAIRKRSEDLKRKVKELLRRLEEEGRRVSLEEAIKIIKEILDELAKVNEDIIRIIKELLKRLVDTNRRVIETIDRILKKLVDDLRRGNLPEDKLREVERELRELKKELEEIVRESEKMLKELEDKLREIVRESRELLEKLRRDLKRIKDGNLSADEALEMLKRLLDKALKVHEDVLRKLVELVDEVLKVLEMSCAQESTLAAKVLEVLRKITK

SEQ ID NO: 27882 - protein, 233 aa, Artificial Sequence
  Synthetic
SAEEELEKLVRKVEEDLKRLEEESERIKKEIKDTLRAIRKRSEDLKRKVKELLRRLEEEGRRVSLEEAIKIIKEILDELAKVNEDIIRIIKELLKRLVDTNRRVIETIDRILKKLVDDLRRGNLPEDKLREVERELRELKKELEEIVRESEKMLKELEDKLREIVRESRELLEKLRRDLKRIKDGNLSADEALEMLKRLLDKALKVHEDLAMSCAQESDEVLKVHEESLRKLL

SEQ ID NO: 27883 - protein, 236 aa, Artificial Sequence
  Synthetic
SAEEELEKLVRKVEEDLKRLEEESERIKKEIKDTLRAIRKRSEDLKRKVKELLRRLEEEGRRVSLEEAIKIIKEILDELAKVNEDIIRIIKELLKRLVDTNRRVIETIDRILKKLVDDLRRGNLPEDKLREVERELRELKKELEEIVRESEKMLKELEDKLREIVRESRELLEKLRRDLKRIKDGNLSADEALEMLKRLLDKALKVHEDVLRLGMSCAQESLKVHEESLRKLLTLA

SEQ ID NO: 27884 - protein, 237 aa, Artificial Sequence
  Synthetic
SAEEELEKLVRKVEEDLKRLEEESERIKKEIKDTLRAIRKRSEDLKRKVKELLRRLEEEGRRVSLEEAIKIIKEILDELAKVNEDIIRIIKELLKRLVDTNRRVIETIDRILKKLVDDLRRGNLPEDKLREVERELRELKKELEEIVRESEKMLKELEDKLREIVRESRELLEKLRRDLKRIKDGNLSADEALEMLKRLLDKALKVHEDVLRKLTMSCAQESKVHEESLRKLLTLAA

SEQ ID NO: 27885 - protein, 240 aa, Artificial Sequence; identical to SEQ ID NO: 27879
  Synthetic

SEQ ID NO: 27886 - protein, 241 aa, Artificial Sequence
  Synthetic
SAEEELEKLVRKVEEDLKRLEEESERIKKEIKDTLRAIRKRSEDLKRKVKELLRRLEEEGRRVSLEEAIKIIKEILDELAKVNEDIIRIIKELLKRLVDTNRRVIETIDRILKKLVDDLRRGNLPEDKLREVERELRELKKELEEIVRESEKMLKELEDKLREIVRESRELLEKLRRDLKRIKDGNLSADEALEMLKRLLDKALKVHEDVLRKLVELLLMSCAQESESLRKLLTLAAKVLE

SEQ ID NO: 27887 - protein, 244 aa, Artificial Sequence
  Synthetic
SAEEELEKLVRKVEEDLKRLEEESERIKKEIKDTLRAIRKRSEDLKRKVKELLRRLEEEGRRVSLEEAIKIIKEILDELAKVNEDIIRIIKELLKRLVDTNRRVIETIDRILKKLVDDLRRGNLPEDKLREVERELRELKKELEEIVRESEKMLKELEDKLREIVRESRELLEKLRRDLKRIKDGNLSADEALEMLKRLLDKALKVHEDVLRKLVELVDELMMSCAQESRKLLTLAAKVLEVLR

SEQ ID NO: 27888 - protein, 247 aa, Artificial Sequence
  Synthetic
SAEEELEKLVRKVEEDLKRLEEESERIKKEIKDTLRAIRKRSEDLKRKVKELLRRLEEEGRRVSLEEAIKIIKEILDELAKVNEDIIRIIKELLKRLVDTNRRVIETIDRILKKLVDDLRRGNLPEDKLREVERELRELKKELEEIVRESEKMLKELEDKLREIVRESRELLEKLRRDLKRIKDGNLSADEALEMLKRLLDKALKVHEDVLRKLVELVDEVLKLHMSCAQESLTLAAKVLEVLRKIT

SEQ ID NO: 27889 - protein, 229 aa, Artificial Sequence
  Synthetic
DDERRKLEDLERMVEELKRKSDKLLKEIREEVERLERETRKLLEELKAKVDELREDLRRNPGDRVLEKLVKLLEDILDKVRKLLKENLDLLKRLLDIIEKLLRDNVRLLEELLRIVRELGKSGDEEKLTRKLEKALKEVRDAARETRERLKEAKKEVKTVADRNRARLEELEEEVKRVLDEIRKEGGPSEDLEKAERLVKDILRLLEMSCAQESDVVRDLLRALEKHTR

SEQ ID NO: 27890 - protein, 236 aa, Artificial Sequence
  Synthetic
DDERRKLEDLERMVEELKRKSDKLLKEIREEVERLERETRKLLEELKAKVDELREDLRRNPGDRVLEKLVKLLEDILDKVRKLLKENLDLLKRLLDIIEKLLRDNVRLLEELLRIVRELGKSGDEEKLTRKLEKALKEVRDAARETRERLKEAKKEVKTVADRNRARLEELEEEVKRVLDEIRKEGGPSEDLEKAERLVKDILRLNEEHTAELEMSCAQESRALEKHTRDLEKLVK

SEQ ID NO: 27891 - protein, 243 aa, Artificial Sequence
  Synthetic
DDERRKLEDLERMVEELKRKSDKLLKEIREEVERLERETRKLLEELKAKVDELREDLRRNPGDRVLEKLVKLLEDILDKVRKLLKENLDLLKRLLDIIEKLLRDNVRLLEELLRIVRELGKSGDEEKLTRKLEKALKEVRDAARETRERLKEAKKEVKTVADRNRARLEELEEEVKRVLDEIRKEGGPSEDLEKAERLVKDILRLNEEHTAELEDVVRDLNMSCAQESRDLEKLVKDALDKVK

SEQ ID NO: 27892 - protein, 229 aa, Artificial Sequence; identical to SEQ ID NO: 27889
  Synthetic

SEQ ID NO: 27893 - protein, 240 aa, Artificial Sequence
  Synthetic
DDERRKLEDLERMVEELKRKSDKLLKEIREEVERLERETRKLLEELKAKVDELREDLRRNPGDRVLEKLVKLLEDILDKVRKLLKENLDLLKRLLDIIEKLLRDNVRLLEELLRIVRELGKSGDEEKLTRKLEKALKEVRDAARETRERLKEAKKEVKTVADRNRARLEELEEEVKRVLDEIRKEGGPSEDLEKAERLVKDILRLNEEHTAELEDVLKMSCAQESKHTRDLEKLVKDALD

SEQ ID NO: 27894 - protein, 243 aa, Artificial Sequence
  Synthetic
DDERRKLEDLERMVEELKRKSDKLLKEIREEVERLERETRKLLEELKAKVDELREDLRRNPGDRVLEKLVKLLEDILDKVRKLLKENLDLLKRLLDIIEKLLRDNVRLLEELLRIVRELGKSGDEEKLTRKLEKALKEVRDAARETRERLKEAKKEVKTVADRNRARLEELEEEVKRVLDEIRKEGGPSEDLEKAERLVKDILRLNEEHTAELEDVVRDLIMSCAQESRDLEKLVKDALDKVK

SEQ ID NO: 27895 - protein, 236 aa, Artificial Sequence
  Synthetic
SKIDEALKKLAKILEDAIKLNKELNDTTAEILKEIIKLNAEVLEKIRRILKELVDLILKGLKDDEEAKKELKKVLEEVARRLEEIKKETDRIVKEVEELNERNDREVKRAAEEVRRLLEEIKRSDRDEKELIKALKEIVDRIREAHRRSVEELSEVVKRILDALKDTLRKLEDVVRKLLELARRIAGDTEELRRVVEKVRKELEDDKERYKRLEMSCAQESEEMKRRSEDLERKVE

SEQ ID NO: 27896 - protein, 240 aa, Artificial Sequence
  Synthetic
SKIDEALKKLAKILEDAIKLNKELNDTTAEILKEIIKLNAEVLEKIRRILKELVDLILKGLKDDEEAKKELKKVLEEVARRLEEIKKETDRIVKEVEELNERNDREVKRAAEEVRRLLEEIKRSDRDEKELIKALKEIVDRIREAHRRSVEELSEVVKRILDALKDTLRKLEDVVRKLLELARRIAGDTEELRRVVEKVRKELEDDKERYKRLEEELRMSCAQESRRSEDLERKVEEILR

SEQ ID NO: 27897 - protein, 236 aa, Artificial Sequence; identical to SEQ ID NO: 27895
  Synthetic

SEQ ID NO: 27898 - protein, 231 aa, Artificial Sequence
  Synthetic
DEEEKIREDLERTLREYERELRRAKEELKETLKRYEEELREVKEDLDRTLEEVDDLLRRGSLSDREAIRILRELLKKLEEIIRRSKEVLDKLIKDLEDISRRSIEVLEELVKKVRKDGLPEEVLRRIKDLIRRLRERNKEILDRIRKLIEELVERNKRALDRLRKLIKELEERVRRTDDKETLARDLKEALKTLIKLIREILEDNLRLLMSCAQESETLLEDNRRVLEEII

SEQ ID NO: 27899 - protein, 234 aa, Artificial Sequence
  Synthetic
DEEEKIREDLERTLREYERELRRAKEELKETLKRYEEELREVKEDLDRTLEEVDDLLRRGSLSDREAIRILRELLKKLEEIIRRSKEVLDKLIKDLEDISRRSIEVLEELVKKVRKDGLPEEVLRRIKDLIRRLRERNKEILDRIRKLIEELVERNKRALDRLRKLIKELEERVRRTDDKETLARDLKEALKTLIKLIREILEDNLRVLRLAMSCAQESLEDNRRVLEEIIKLI

SEQ ID NO: 27900 - protein, 225 aa, Artificial Sequence
  Synthetic
DEEEKIREDLERTLREYERELRRAKEELKETLKRYEEELREVKEDLDRTLEEVDDLLRRGSLSDREAIRILRELLKKLEEIIRRSKEVLDKLIKDLEDISRRSIEVLEELVKKVRKDGLPEEVLRRIKDLIRRLRERNKEILDRIRKLIEELVERNKRALDRLRKLIKELEERVRRTDDKETLARDLKEALKTLIKLIREILEMSCAQESRIIELIETLLEDNRR

SEQ ID NO: 27901 - protein, 227 aa, Artificial Sequence
  Synthetic
DEEEKIREDLERTLREYERELRRAKEELKETLKRYEEELREVKEDLDRTLEEVDDLLRRGSLSDREAIRILRELLKKLEEIIRRSKEVLDKLIKDLEDISRRSIEVLEELVKKVRKDGLPEEVLRRIKDLIRRLRERNKEILDRIRKLIEELVERNKRALDRLRKLIKELEERVRRTDDKETLARDLKEALKTLIKLIREILELAMSCAQESIELIETLLEDNRRVL

SEQ ID NO: 27902 - protein, 231 aa, Artificial Sequence; identical to SEQ ID NO: 27898
  Synthetic

SEQ ID NO: 27903 - protein, 232 aa, Artificial Sequence
  Synthetic
DEEEKIREDLERTLREYERELRRAKEELKETLKRYEEELREVKEDLDRTLEEVDDLLRRGSLSDREAIRILRELLKKLEEIIRRSKEVLDKLIKDLEDISRRSIEVLEELVKKVRKDGLPEEVLRRIKDLIRRLRERNKEILDRIRKLIEELVERNKRALDRLRKLIKELEERVRRTDDKETLARDLKEALKTLIKLIREILEDNLRVLRMSCAQESTLLEDNRRVLEEIIK

SEQ ID NO: 27904 - protein, 234 aa, Artificial Sequence
  Synthetic
DEEEKIREDLERTLREYERELRRAKEELKETLKRYEEELREVKEDLDRTLEEVDDLLRRGSLSDREAIRILRELLKKLEEIIRRSKEVLDKLIKDLEDISRRSIEVLEELVKKVRKDGLPEEVLRRIKDLIRRLRERNKEILDRIRKLIEELVERNKRALDRLRKLIKELEERVRRTDDKETLARDLKEALKTLIKLIREILEDNLRVLRLVMSCAQESLEDNRRVLEEIIKLI

SEQ ID NO: 27905 - protein, 229 aa, Artificial Sequence
  Synthetic
DELEKVERLLEEIEKIIEDLIRRVEELVRRILEFNKTTLKRNEELVRELEKLVKETTGGTEELKKIVEKLEKLHREVKKKSDDLVKRAEELLKEVKERLKEIVKTIREELRKVKESGGDREELLKLLAEILDKLLKLLKRIIEELLRILKELIKASKESLDDLKRINEELLRDIEDLIRKGIKESKEVVRKLEEDLRRVRERSKKLVMSCAQESEDLEETIKEEKRRVD

SEQ ID NO: 27906 - protein, 229 aa, Artificial Sequence
  Synthetic
DELEKVERLLEEIEKIIEDLIRRVEELVRRILEFNKTTLKRNEELVRELEKLVKETTGGTEELKKIVEKLEKLHREVKKKSDDLVKRAEELLKEVKERLKEIVKTIREELRKVKESGGDREELLKLLAEILDKLLKLLKRIIEELLRILKELIKASKESLDDLKRINEELLRDIEDLIRKGIKESKEVVRKLEEDLRRVRERSKKLYMSCAQESEDLEETIKEEKRRVD

SEQ ID NO: 27907 - protein, 240 aa, Artificial Sequence
  Synthetic
DELEKVERLLEEIEKIIEDLIRRVEELVRRILEFNKTTLKRNEELVRELEKLVKETTGGTEELKKIVEKLEKLHREVKKKSDDLVKRAEELLKEVKERLKEIVKTIREELRKVKESGGDREELLKLLAEILDKLLKLLKRIIEELLRILKELIKASKESLDDLKRINEELLRDIEDLIRKGIKESKEVVRKLEEDLRRVRERSKKLVREHEKFLEDLKMSCAQESRRVDEELKRIKEEIK

SEQ ID NO: 27908 - protein, 234 aa, Artificial Sequence
  Synthetic
SEKERLMRLLDKLKDLNRRLVERIKELLDKALELHKKLVKELRELLERLKELVERGGVPEELLTRIDELIKKLEDEARKISKEVKRLIDELKKRLEDIHREVDRLIRELKETLKGVTDKDELLRRVAEVLERIARLSEELIREVKEVLEKIVELSRELLKRVLDVLRRIAELLEDALRKGNVSEETVRRLREALKKLEDDLRKIERDAERLYMSCAQESEELTERYRREIRKLK

SEQ ID NO: 27909 - protein, 238 aa, Artificial Sequence
  Synthetic
SEKERLMRLLDKLKDLNRRLVERIKELLDKALELHKKLVKELRELLERLKELVERGGVPEELLTRIDELIKKLEDEARKISKEVKRLIDELKKRLEDIHREVDRLIRELKETLKGVTDKDELLRRVAEVLERIARLSEELIREVKEVLEKIVELSRELLKRVLDVLRRIAELLEDALRKGNVSEETVRRLREALKKLEDDLRKIERDAEREYKKLLMSCAQESERYRREIRKLKEELK

SEQ ID NO: 27910 - protein, 234 aa, Artificial Sequence; identical to SEQ ID NO: 27908
  Synthetic

SEQ ID NO: 27911 - protein, 238 aa, Artificial Sequence; identical to SEQ ID NO: 27909
  Synthetic

SEQ ID NO: 27912 - protein, 233 aa, Artificial Sequence
  Synthetic
SEAEDLEELIKELAELLKDVIRKLEKINRRLVKILEDIIRRLKEISKEAEEELRKGTVEDKDILRDLERRLREILEESDRLLEELKRRLEEILRKSKELLRRLEEVLREILKRAEEVKRSNLPKEELIKEIVKLLEELLRVIEKILEDNIRLLEELVEVIKEILEKHLRLLEELVRVIERILREVGKDKDEAERRRRELKDKLDRLREELLMSCAQESEELTRLRETHKKIEK

SEQ ID NO: 27913 - protein, 236 aa, Artificial Sequence
  Synthetic
SEAEDLEELIKELAELLKDVIRKLEKINRRLVKILEDIIRRLKEISKEAEEELRKGTVEDKDILRDLERRLREILEESDRLLEELKRRLEEILRKSKELLRRLEEVLREILKRAEEVKRSNLPKEELIKEIVKLLEELLRVIEKILEDNIRLLEELVEVIKEILEKHLRLLEELVRVIERILREVGKDKDEAERRRRELKDKLDRLREEHEELKMSCAQESTRLRETHKKIEKELR

SEQ ID NO: 27914 - protein, 243 aa, Artificial Sequence
  Synthetic
SEAEDLEELIKELAELLKDVIRKLEKINRRLVKILEDIIRRLKEISKEAEEELRKGTVEDKDILRDLERRLREILEESDRLLEELKRRLEEILRKSKELLRRLEEVLREILKRAEEVKRSNLPKEELIKEIVKLLEELLRVIEKILEDNIRLLEELVEVIKEILEKHLRLLEELVRVIERILREVGKDKDEAERRRRELKDKLDRLREEHEEVKRRLEELLMSCAQESKKIEKELREALKRVR

SEQ ID NO: 27915 - protein, 247 aa, Artificial Sequence
  Synthetic
SEAEDLEELIKELAELLKDVIRKLEKINRRLVKILEDIIRRLKEISKEAEEELRKGTVEDKDILRDLERRLREILEESDRLLEELKRRLEEILRKSKELLRRLEEVLREILKRAEEVKRSNLPKEELIKEIVKLLEELLRVIEKILEDNIRLLEELVEVIKEILEKHLRLLEELVRVIERILREVGKDKDEAERRRRELKDKLDRLREEHEEVKRRLEEELTRLRMSCAQESKELREALKRVRDRST

SEQ ID NO: 27916 - protein, 232 aa, Artificial Sequence
  Synthetic
SEAEDLEELIKELAELLKDVIRKLEKINRRLVKILEDIIRRLKEISKEAEEELRKGTVEDKDILRDLERRLREILEESDRLLEELKRRLEEILRKSKELLRRLEEVLREILKRAEEVKRSNLPKEELIKEIVKLLEELLRVIEKILEDNIRLLEELVEVIKEILEKHLRLLEELVRVIERILREVGKDKDEAERRRRELKDKLDRLRELHMSCAQESEEELTRLRETHKKIE

SEQ ID NO: 27917 - protein, 233 aa, Artificial Sequence
  Synthetic
SEAEDLEELIKELAELLKDVIRKLEKINRRLVKILEDIIRRLKEISKEAEEELRKGTVEDKDILRDLERRLREILEESDRLLEELKRRLEEILRKSKELLRRLEEVLREILKRAEEVKRSNLPKEELIKEIVKLLEELLRVIEKILEDNIRLLEELVEVIKEILEKHLRLLEELVRVIERILREVGKDKDEAERRRRELKDKLDRLREELKMSCAQESEELTRLRETHKKIEK

SEQ ID NO: 27918 - protein, 243 aa, Artificial Sequence; identical to SEQ ID NO: 27914
  Synthetic

SEQ ID NO: 27919 - protein, 247 aa, Artificial Sequence; identical to SEQ ID NO: 27915
  Synthetic

SEQ ID NO: 27920 - protein, 228 aa, Artificial Sequence
  Synthetic
SDKEEIKRRVEKTARDLETEHDKIKKRLEDTVRDIKRELDELLEKYERVLRKIEKTLREGDGDATDLVDKLLETVKRLNEEVLRTVKKIADELRRLVEEVLRVLRESNETLARLLEEGNVGDEVRERLEEVLRRTEEIIKTLEEIVKRLLDELRRLVEELRRISKKLKDELDKIKEKGKDEKRLIEEVVRLLRENLDVVRRILELLMSCAQESLEALEEVLRRNKELI

SEQ ID NO: 27921 - protein, 229 aa, Artificial Sequence
  Synthetic
SDKEEIKRRVEKTARDLETEHDKIKKRLEDTVRDIKRELDELLEKYERVLRKIEKTLREGDGDATDLVDKLLETVKRLNEEVLRTVKKIADELRRLVEEVLRVLRESNETLARLLEEGNVGDEVRERLEEVLRRTEEIIKTLEEIVKRLLDELRRLVEELRRISKKLKDELDKIKEKGKDEKRLIEEVVRLLRENLDVVRRILEALKMSCAQESEALEEVLRRNKELIR

SEQ ID NO: 27922 - protein, 232 aa, Artificial Sequence
  Synthetic
SDKEEIKRRVEKTARDLETEHDKIKKRLEDTVRDIKRELDELLEKYERVLRKIEKTLREGDGDATDLVDKLLETVKRLNEEVLRTVKKIADELRRLVEEVLRVLRESNETLARLLEEGNVGDEVRERLEEVLRRTEEIIKTLEEIVKRLLDELRRLVEELRRISKKLKDELDKIKEKGKDEKRLIEEVVRLLRENLDVVRRILEALAKLVMSCAQESEEVLRRNKELIRELL

SEQ ID NO: 27923 - protein, 235 aa, Artificial Sequence
  Synthetic
SDKEEIKRRVEKTARDLETEHDKIKKRLEDTVRDIKRELDELLEKYERVLRKIEKTLREGDGDATDLVDKLLETVKRLNEEVLRTVKKIADELRRLVEEVLRVLRESNETLARLLEEGNVGDEVRERLEEVLRRTEEIIKTLEEIVKRLLDELRRLVEELRRISKKLKDELDKIKEKGKDEKRLIEEVVRLLRENLDVVRRILEALAKLIKLLMSCAQESLRRNKELIRELLRVL

SEQ ID NO: 27924 - protein, 236 aa, Artificial Sequence
  Synthetic
SDKEEIKRRVEKTARDLETEHDKIKKRLEDTVRDIKRELDELLEKYERVLRKIEKTLREGDGDATDLVDKLLETVKRLNEEVLRTVKKIADELRRLVEEVLRVLRESNETLARLLEEGNVGDEVRERLEEVLRRTEEIIKTLEEIVKRLLDELRRLVEELRRISKKLKDELDKIKEKGKDEKRLIEEVVRLLRENLDVVRRILEALAKLIKELLMSCAQESRRNKELIRELLRVLD

SEQ ID NO: 27925 - protein, 239 aa, Artificial Sequence
  Synthetic
SDKEEIKRRVEKTARDLETEHDKIKKRLEDTVRDIKRELDELLEKYERVLRKIEKTLREGDGDATDLVDKLLETVKRLNEEVLRTVKKIADELRRLVEEVLRVLRESNETLARLLEEGNVGDEVRERLEEVLRRTEEIIKTLEEIVKRLLDELRRLVEELRRISKKLKDELDKIKEKGKDEKRLIEEVVRLLRENLDVVRRILEALAKLIKELLELCMSCAQESKELIRELLRVLDEAL

SEQ ID NO: 27926 - protein, 240 aa, Artificial Sequence
  Synthetic
SDKEEIKRRVEKTARDLETEHDKIKKRLEDTVRDIKRELDELLEKYERVLRKIEKTLREGDGDATDLVDKLLETVKRLNEEVLRTVKKIADELRRLVEEVLRVLRESNETLARLLEEGNVGDEVRERLEEVLRRTEEIIKTLEEIVKRLLDELRRLVEELRRISKKLKDELDKIKEKGKDEKRLIEEVVRLLRENLDVVRRILEALAKLIKELLEALKMSCAQESELIRELLRVLDEALK

SEQ ID NO: 27927 - protein, 228 aa, Artificial Sequence; identical to SEQ ID NO: 27920
  Synthetic

SEQ ID NO: 27928 - protein, 232 aa, Artificial Sequence
  Synthetic
SDKEEIKRRVEKTARDLETEHDKIKKRLEDTVRDIKRELDELLEKYERVLRKIEKTLREGDGDATDLVDKLLETVKRLNEEVLRTVKKIADELRRLVEEVLRVLRESNETLARLLEEGNVGDEVRERLEEVLRRTEEIIKTLEEIVKRLLDELRRLVEELRRISKKLKDELDKIKEKGKDEKRLIEEVVRLLRENLDVVRRILEALAKLIMSCAQESEEVLRRNKELIRELL

SEQ ID NO: 27929 - protein, 235 aa, Artificial Sequence; identical to SEQ ID NO: 27923
  Synthetic

SEQ ID NO: 27930 - protein, 236 aa, Artificial Sequence; identical to SEQ ID NO: 27924
  Synthetic

SEQ ID NO: 27931 - protein, 239 aa, Artificial Sequence
  Synthetic
SDKEEIKRRVEKTARDLETEHDKIKKRLEDTVRDIKRELDELLEKYERVLRKIEKTLREGDGDATDLVDKLLETVKRLNEEVLRTVKKIADELRRLVEEVLRVLRESNETLARLLEEGNVGDEVRERLEEVLRRTEEIIKTLEEIVKRLLDELRRLVEELRRISKKLKDELDKIKEKGKDEKRLIEEVVRLLRENLDVVRRILEALAKLIKELLELLMSCAQESKELIRELLRVLDEAL

SEQ ID NO: 27932 - protein, 240 aa, Artificial Sequence; identical to SEQ ID NO: 27926
  Synthetic

SEQ ID NO: 27933 - protein, 237 aa, Artificial Sequence
  Synthetic
DEEERVKKLLTDLRRLLRKLHEESKKLLDELRKKLRELRRRSEEKLREVERRLREAEKKLPGTRVLKLVADVVKKVLDAIRDLNRKLEEIIDEALKLLEELDDILRRVVEEALRLLKEIKDTKGDREEVKKRVEDILKRLEELVKEYEDRVREIKKRLRRALEELRDEYRKIREDIERVLDELRKGGVPEELLRVLEELVRTLKKLLDENLKMLEMSCAQESKVLDDHERKVRRLIE

SEQ ID NO: 27934 - protein, 240 aa, Artificial Sequence
  Synthetic
DEEERVKKLLTDLRRLLRKLHEESKKLLDELRKKLRELRRRSEEKLREVERRLREAEKKLPGTRVLKLVADVVKKVLDAIRDLNRKLEEIIDEALKLLEELDDILRRVVEEALRLLKEIKDTKGDREEVKKRVEDILKRLEELVKEYEDRVREIKKRLRRALEELRDEYRKIREDIERVLDELRKGGVPEELLRVLEELVRTLKKLLDENLKMVERLIMSCAQESDDHERKVRRLIEELL

SEQ ID NO: 27935 - protein, 233 aa, Artificial Sequence
  Synthetic
DEEERVKKLLTDLRRLLRKLHEESKKLLDELRKKLRELRRRSEEKLREVERRLREAEKKLPGTRVLKLVADVVKKVLDAIRDLNRKLEEIIDEALKLLEELDDILRRVVEEALRLLKEIKDTKGDREEVKKRVEDILKRLEELVKEYEDRVREIKKRLRRALEELRDEYRKIREDIERVLDELRKGGVPEELLRVLEELVRTLKKLLDELEMSCAQESRELEKVLDDHERKVR

SEQ ID NO: 27936 - protein, 237 aa, Artificial Sequence
  Synthetic
DEEERVKKLLTDLRRLLRKLHEESKKLLDELRKKLRELRRRSEEKLREVERRLREAEKKLPGTRVLKLVADVVKKVLDAIRDLNRKLEEIIDEALKLLEELDDILRRVVEEALRLLKEIKDTKGDREEVKKRVEDILKRLEELVKEYEDRVREIKKRLRRALEELRDEYRKIREDIERVLDELRKGGVPEELLRVLEELVRTLKKLLDENLKMLAMSCAQESKVLDDHERKVRRLIE

SEQ ID NO: 27937 - protein, 240 aa, Artificial Sequence; identical to SEQ ID NO: 27934
  Synthetic

SEQ ID NO: 27938 - protein, 244 aa, Artificial Sequence
  Synthetic
DEEERVKKLLTDLRRLLRKLHEESKKLLDELRKKLRELRRRSEEKLREVERRLREAEKKLPGTRVLKLVADVVKKVLDAIRDLNRKLEEIIDEALKLLEELDDILRRVVEEALRLLKEIKDTKGDREEVKKRVEDILKRLEELVKEYEDRVREIKKRLRRALEELRDEYRKIREDIERVLDELRKGGVPEELLRVLEELVRTLKKLLDENLKMVERLIRELEMSCAQESRKVRRLIEELLEVLD

SEQ ID NO: 27939 - protein, 248 aa, Artificial Sequence
  Synthetic
DEEERVKKLLTDLRRLLRKLHEESKKLLDELRKKLRELRRRSEEKLREVERRLREAEKKLPGTRVLKLVADVVKKVLDAIRDLNRKLEEIIDEALKLLEELDDILRRVVEEALRLLKEIKDTKGDREEVKKRVEDILKRLEELVKEYEDRVREIKKRLRRALEELRDEYRKIREDIERVLDELRKGGVPEELLRVLEELVRTLKKLLDENLKMVERLIRELEKVLDMSCAQESRLIEELLEVLDRDAK

SEQ ID NO: 27940 - protein, 244 aa, Artificial Sequence
  Synthetic
DEDRIIEEIARLLEELLRELLELIKKLIETNRRLNEEHERAVRELARLLEELLDRLVKKGISDEKLKRIRERLKRALDDLERLHREINKRLEDLVRELEKLVREILKELKDALEELRRASARAGGEEVLRRLEEIVKKLLDLVRRILERLKEIHKDNVRLLRELNERLTRIVEDLVRLIREILREAGVDEKIAEEIERELEELRRMIKRLHEDLERKLKELLMSCAQESARLEEKIRRLEEKLE

SEQ ID NO: 27941 - protein, 244 aa, Artificial Sequence
  Synthetic
DEDRIIEEIARLLEELLRELLELIKKLIETNRRLNEEHERAVRELARLLEELLDRLVKKGISDEKLKRIRERLKRALDDLERLHREINKRLEDLVRELEKLVREILKELKDALEELRRASARAGGEEVLRRLEEIVKKLLDLVRRILERLKEIHKDNVRLLRELNERLTRIVEDLVRLIREILREAGVDEKIAEEIERELEELRRMIKRLHEDLERKLKELEMSCAQESARLEEKIRRLEEKLE

SEQ ID NO: 27942 - protein, 236 aa, Artificial Sequence
  Synthetic
DEEEKIRTTLDLLRKLLKVLREILEELIRSNKELNERLLRLVEDSDRLLEELLKKLADDGGVDEEALRRIKKRLEDLIRTNREIEERIDRESERLAEELRRILRELEKELRRLIEDLKEVLKRGLPREELLRRLKKVVEDVLRILEEVLRVVDELDKENVRLLREWLERNKEIVEEVIRILEDLIRKGGSESEEKVRDTEKKLRDLREKHAELAMSCAQESRENRRRLEELAREAK

SEQ ID NO: 27943 - protein, 239 aa, Artificial Sequence
  Synthetic
DEEEKIRTTLDLLRKLLKVLREILEELIRSNKELNERLLRLVEDSDRLLEELLKKLADDGGVDEEALRRIKKRLEDLIRTNREIEERIDRESERLAEELRRILRELEKELRRLIEDLKEVLKRGLPREELLRRLKKVVEDVLRILEEVLRVVDELDKENVRLLREWLERNKEIVEEVIRILEDLIRKGGSESEEKVRDTEKKLRDLREKHAEIAKLVMSCAQESRRRLEELAREAKKVL

SEQ ID NO: 27944 - protein, 243 aa, Artificial Sequence
  Synthetic
DEEEKIRTTLDLLRKLLKVLREILEELIRSNKELNERLLRLVEDSDRLLEELLKKLADDGGVDEEALRRIKKRLEDLIRTNREIEERIDRESERLAEELRRILRELEKELRRLIEDLKEVLKRGLPREELLRRLKKVVEDVLRILEEVLRVVDELDKENVRLLREWLERNKEIVEEVIRILEDLIRKGGSESEEKVRDTEKKLRDLREKHAEIAKELERLLMSCAQESEELAREAKKVLDELR

SEQ ID NO: 27945 - protein, 247 aa, Artificial Sequence
  Synthetic
DEEEKIRTTLDLLRKLLKVLREILEELIRSNKELNERLLRLVEDSDRLLEELLKKLADDGGVDEEALRRIKKRLEDLIRTNREIEERIDRESERLAEELRRILRELEKELRRLIEDLKEVLKRGLPREELLRRLKKVVEDVLRILEEVLRVVDELDKENVRLLREWLERNKEIVEEVIRILEDLIRKGGSESEEKVRDTEKKLRDLREKHAEIAKELERLLRELLMSCAQESREAKKVLDELRKRLE

SEQ ID NO: 27946 - protein, 236 aa, Artificial Sequence; identical to SEQ ID NO: 27942
  Synthetic

SEQ ID NO: 27947 - protein, 240 aa, Artificial Sequence
  Synthetic
DEEEKIRTTLDLLRKLLKVLREILEELIRSNKELNERLLRLVEDSDRLLEELLKKLADDGGVDEEALRRIKKRLEDLIRTNREIEERIDRESERLAEELRRILRELEKELRRLIEDLKEVLKRGLPREELLRRLKKVVEDVLRILEEVLRVVDELDKENVRLLREWLERNKEIVEEVIRILEDLIRKGGSESEEKVRDTEKKLRDLREKHAEIAKELEMSCAQESRRLEELAREAKKVLD

SEQ ID NO: 27948 - protein, 243 aa, Artificial Sequence
  Synthetic
DEEEKIRTTLDLLRKLLKVLREILEELIRSNKELNERLLRLVEDSDRLLEELLKKLADDGGVDEEALRRIKKRLEDLIRTNREIEERIDRESERLAEELRRILRELEKELRRLIEDLKEVLKRGLPREELLRRLKKVVEDVLRILEEVLRVVDELDKENVRLLREWLERNKEIVEEVIRILEDLIRKGGSESEEKVRDTEKKLRDLREKHAEIAKELERLIMSCAQESEELAREAKKVLDELR

SEQ ID NO: 27949 - protein, 247 aa, Artificial Sequence; identical to SEQ ID NO: 27945
  Synthetic

SEQ ID NO: 27950 - protein, 230 aa, Artificial Sequence
  Synthetic
SEKEKLLKESEEEVRRLRRTLEELLRKYREVLERLRKELREIEERVRDVVRRLKEVLDRKGLDIDTIIKEVEDLLKTVLDRLRELLDKIRRLTKEAIEVVREIIERIVRHAERVKDELRKEGGDKEKLDRVDRLIKENTRHLKEILDRIEDLVRRSEKKLRDIIREVRRLIEELRKKAEEIKKGPDERLVKTLIEDVEAVIKRILELAMSCAQESERVLERIIRELTDNL

SEQ ID NO: 27951 - protein, 231 aa, Artificial Sequence
  Synthetic
SEKEKLLKESEEEVRRLRRTLEELLRKYREVLERLRKELREIEERVRDVVRRLKEVLDRKGLDIDTIIKEVEDLLKTVLDRLRELLDKIRRLTKEAIEVVREIIERIVRHAERVKDELRKEGGDKEKLDRVDRLIKENTRHLKEILDRIEDLVRRSEKKLRDIIREVRRLIEELRKKAEEIKKGPDERLVKTLIEDVEAVIKRILELLEMSCAQESRVLERIIRELTDNLE

SEQ ID NO: 27952 - protein, 234 aa, Artificial Sequence
  Synthetic
SEKEKLLKESEEEVRRLRRTLEELLRKYREVLERLRKELREIEERVRDVVRRLKEVLDRKGLDIDTIIKEVEDLLKTVLDRLRELLDKIRRLTKEAIEVVREIIERIVRHAERVKDELRKEGGDKEKLDRVDRLIKENTRHLKEILDRIEDLVRRSEKKLRDIIREVRRLIEELRKKAEEIKKGPDERLVKTLIEDVEAVIKRILELITRLAMSCAQESERIIRELTDNLERHL

SEQ ID NO: 27953 - protein, 237 aa, Artificial Sequence
  Synthetic
SEKEKLLKESEEEVRRLRRTLEELLRKYREVLERLRKELREIEERVRDVVRRLKEVLDRKGLDIDTIIKEVEDLLKTVLDRLRELLDKIRRLTKEAIEVVREIIERIVRHAERVKDELRKEGGDKEKLDRVDRLIKENTRHLKEILDRIEDLVRRSEKKLRDIIREVRRLIEELRKKAEEIKKGPDERLVKTLIEDVEAVIKRILELITRVAELAMSCAQESIRELTDNLERHLKIV

SEQ ID NO: 27954 - protein, 238 aa, Artificial Sequence
  Synthetic
SEKEKLLKESEEEVRRLRRTLEELLRKYREVLERLRKELREIEERVRDVVRRLKEVLDRKGLDIDTIIKEVEDLLKTVLDRLRELLDKIRRLTKEAIEVVREIIERIVRHAERVKDELRKEGGDKEKLDRVDRLIKENTRHLKEILDRIEDLVRRSEKKLRDIIREVRRLIEELRKKAEEIKKGPDERLVKTLIEDVEAVIKRILELITRVAEDLWMSCAQESRELTDNLERHLKIVR

SEQ ID NO: 27955 - protein, 242 aa, Artificial Sequence
  Synthetic
SEKEKLLKESEEEVRRLRRTLEELLRKYREVLERLRKELREIEERVRDVVRRLKEVLDRKGLDIDTIIKEVEDLLKTVLDRLRELLDKIRRLTKEAIEVVREIIERIVRHAERVKDELRKEGGDKEKLDRVDRLIKENTRHLKEILDRIEDLVRRSEKKLRDIIREVRRLIEELRKKAEEIKKGPDERLVKTLIEDVEAVIKRILELITRVAEDNERVLKMSCAQESDNLERHLKIVREIVK

SEQ ID NO: 27956 - protein, 230 aa, Artificial Sequence; identical to SEQ ID NO: 27950
  Synthetic

SEQ ID NO: 27957 - protein, 231 aa, Artificial Sequence; identical to SEQ ID NO: 27951
  Synthetic

SEQ ID NO: 27958 - protein, 234 aa, Artificial Sequence; identical to SEQ ID NO: 27952
  Synthetic

SEQ ID NO: 27959 - protein, 237 aa, Artificial Sequence
  Synthetic
SEKEKLLKESEEEVRRLRRTLEELLRKYREVLERLRKELREIEERVRDVVRRLKEVLDRKGLDIDTIIKEVEDLLKTVLDRLRELLDKIRRLTKEAIEVVREIIERIVRHAERVKDELRKEGGDKEKLDRVDRLIKENTRHLKEILDRIEDLVRRSEKKLRDIIREVRRLIEELRKKAEEIKKGPDERLVKTLIEDVEAVIKRILELITRVAELVMSCAQESIRELTDNLERHLKIV

SEQ ID NO: 27960 - protein, 238 aa, Artificial Sequence
  Synthetic
SEKEKLLKESEEEVRRLRRTLEELLRKYREVLERLRKELREIEERVRDVVRRLKEVLDRKGLDIDTIIKEVEDLLKTVLDRLRELLDKIRRLTKEAIEVVREIIERIVRHAERVKDELRKEGGDKEKLDRVDRLIKENTRHLKEILDRIEDLVRRSEKKLRDIIREVRRLIEELRKKAEEIKKGPDERLVKTLIEDVEAVIKRILELITRVAEDLYMSCAQESRELTDNLERHLKIVR

SEQ ID NO: 27961 - protein, 242 aa, Artificial Sequence; identical to SEQ ID NO: 27955
  Synthetic

SEQ ID NO: 27962 - protein, 229 aa, Artificial Sequence
  Synthetic
SELERAEELIKKLLKLHEDVLRRLTEVDDELLEIHDRVLKRLKEVDDELLKLIRDMLRRGNISEDLVREVEERLKTLEKRSRDKKAENEKALRELKKKSEKLRRESRKLLEELRKKVEELRGVDKKDVEKLIKEIVEVHRAMLEKWLRLNEEIAKVHEDSVRDWLKANEEIARTIEEILRRVLRGDEEAKDIREKLERLLRKSEELVMSCAQESKELLDKSKKLLEDSK

SEQ ID NO: 27963 - protein, 233 aa, Artificial Sequence
  Synthetic
SELERAEELIKKLLKLHEDVLRRLTEVDDELLEIHDRVLKRLKEVDDELLKLIRDMLRRGNISEDLVREVEERLKTLEKRSRDKKAENEKALRELKKKSEKLRRESRKLLEELRKKVEELRGVDKKDVEKLIKEIVEVHRAMLEKWLRLNEEIAKVHEDSVRDWLKANEEIARTIEEILRRVLRGDEEAKDIREKLERLLRKSEELVRKLLMSCAQESDKSKKLLEDSKRRLE

SEQ ID NO: 27964 - protein, 237 aa, Artificial Sequence
  Synthetic
SELERAEELIKKLLKLHEDVLRRLTEVDDELLEIHDRVLKRLKEVDDELLKLIRDMLRRGNISEDLVREVEERLKTLEKRSRDKKAENEKALRELKKKSEKLRRESRKLLEELRKKVEELRGVDKKDVEKLIKEIVEVHRAMLEKWLRLNEEIAKVHEDSVRDWLKANEEIARTIEEILRRVLRGDEEAKDIREKLERLLRKSEELVRKSLKELKMSCAQESKLLEDSKRRLEEILK

SEQ ID NO: 27965 - protein, 240 aa, Artificial Sequence
  Synthetic
SELERAEELIKKLLKLHEDVLRRLTEVDDELLEIHDRVLKRLKEVDDELLKLIRDMLRRGNISEDLVREVEERLKTLEKRSRDKKAENEKALRELKKKSEKLRRESRKLLEELRKKVEELRGVDKKDVEKLIKEIVEVHRAMLEKWLRLNEEIAKVHEDSVRDWLKANEEIARTIEEILRRVLRGDEEAKDIREKLERLLRKSEELVRKSLKELKELLMSCAQESEDSKRRLEEILKEIK

SEQ ID NO: 27966 - protein, 243 aa, Artificial Sequence
  Synthetic
SELERAEELIKKLLKLHEDVLRRLTEVDDELLEIHDRVLKRLKEVDDELLKLIRDMLRRGNISEDLVREVEERLKTLEKRSRDKKAENEKALRELKKKSEKLRRESRKLLEELRKKVEELRGVDKKDVEKLIKEIVEVHRAMLEKWLRLNEEIAKVHEDSVRDWLKANEEIARTIEEILRRVLRGDEEAKDIREKLERLLRKSEELVRKSLKELKELLDLAMSCAQESKRRLEEILKEIKDDS

SEQ ID NO: 27967 - protein, 233 aa, Artificial Sequence; identical to SEQ ID NO: 27963
  Synthetic

SEQ ID NO: 27968 - protein, 236 aa, Artificial Sequence
  Synthetic
SELERAEELIKKLLKLHEDVLRRLTEVDDELLEIHDRVLKRLKEVDDELLKLIRDMLRRGNISEDLVREVEERLKTLEKRSRDKKAENEKALRELKKKSEKLRRESRKLLEELRKKVEELRGVDKKDVEKLIKEIVEVHRAMLEKWLRLNEEIAKVHEDSVRDWLKANEEIARTIEEILRRVLRGDEEAKDIREKLERLLRKSEELVRKSLKLTMSCAQESKKLLEDSKRRLEEIL

SEQ ID NO: 27969 - protein, 237 aa, Artificial Sequence; identical to SEQ ID NO: 27964
  Synthetic

SEQ ID NO: 27970 - protein, 240 aa, Artificial Sequence; identical to SEQ ID NO: 27965
  Synthetic

SEQ ID NO: 27971 - protein, 233 aa, Artificial Sequence
  Synthetic
SLKEIVKEIIDRASELLKRLLERSEDSLRTASELLRKILEDSRRSLRTIARLLEELLRTSGPEEELERAARRVKEELERLHKEIRDVIEEIKKTLAKLNEDLREAIERVKRELERLLKELEDSGVPEELLELVKRVVELMAELLDRLLALNEKILRDIMSILDEILDLNREILRLVKEIIELIRRDGPDREIEKEIRRILEELKAKHDELAMSCAQESREIKRAHEELEDRIR

SEQ ID NO: 27972 - protein, 240 aa, Artificial Sequence
  Synthetic
SLKEIVKEIIDRASELLKRLLERSEDSLRTASELLRKILEDSRRSLRTIARLLEELLRTSGPEEELERAARRVKEELERLHKEIRDVIEEIKKTLAKLNEDLREAIERVKRELERLLKELEDSGVPEELLELVKRVVELMAELLDRLLALNEKILRDIMSILDEILDLNREILRLVKEIIELIRRDGPDREIEKEIRRILEELKAKHDEIEKKIRELEMSCAQESEELEDRIRKIERDLD

SEQ ID NO: 27973 - protein, 244 aa, Artificial Sequence
  Synthetic
SLKEIVKEIIDRASELLKRLLERSEDSLRTASELLRKILEDSRRSLRTIARLLEELLRTSGPEEELERAARRVKEELERLHKEIRDVIEEIKKTLAKLNEDLREAIERVKRELERLLKELEDSGVPEELLELVKRVVELMAELLDRLLALNEKILRDIMSILDEILDLNREILRLVKEIIELIRRDGPDREIEKEIRRILEELKAKHDEIEKKIRELERELKMSCAQESDRIRKIERDLDRRTK

SEQ ID NO: 27974 - protein, 233 aa, Artificial Sequence; identical to SEQ ID NO: 27971
  Synthetic

SEQ ID NO: 27975 - protein, 240 aa, Artificial Sequence; identical to SEQ ID NO: 27972
  Synthetic

SEQ ID NO: 27976 - protein, 244 aa, Artificial Sequence; identical to SEQ ID NO: 27973
  Synthetic

SEQ ID NO: 27977 - protein, 231 aa, Artificial Sequence
  Synthetic
SSEELLKRIVDEDERVLEEWARVLEEIKDLSKAVVDLLDKVLKEIEAIVDEVTRRLERDGTDDKKKIRDLVEEIKDIIRRAREKLRRIVKENEEILEEAKRRLDKIAEDNRRTLEKVRKELEETKSEREVKRILERVLREAEDSHRRAVELLEELLDRSRRTIEEAIRLIKELLDRILELLKRLGLPKDLLETIKKRVEEIRRTLEKLKMSCAQESEEIRAKLERKLEEYK

SEQ ID NO: 27978 - protein, 231 aa, Artificial Sequence
  Synthetic
SSEELLKRIVDEDERVLEEWARVLEEIKDLSKAVVDLLDKVLKEIEAIVDEVTRRLERDGTDDKKKIRDLVEEIKDIIRRAREKLRRIVKENEEILEEAKRRLDKIAEDNRRTLEKVRKELEETKSEREVKRILERVLREAEDSHRRAVELLEELLDRSRRTIEEAIRLIKELLDRILELLKRLGLPKDLLETIKKRVEEIRRTLEKLHMSCAQESEEIRAKLERKLEEYK

SEQ ID NO: 27979 - protein, 242 aa, Artificial Sequence
  Synthetic
SSEELLKRIVDEDERVLEEWARVLEEIKDLSKAVVDLLDKVLKEIEAIVDEVTRRLERDGTDDKKKIRDLVEEIKDIIRRAREKLRRIVKENEEILEEAKRRLDKIAEDNRRTLEKVRKELEETKSEREVKRILERVLREAEDSHRRAVELLEELLDRSRRTIEEAIRLIKELLDRILELLKRLGLPKDLLETIKKRVEEIRRTLEKIKRDYDKAIEELLMSCAQESEEYKEVIDDLRRKTK

SEQ ID NO: 27980 - protein, 230 aa, Artificial Sequence
  Synthetic
DADELLRRLAEEVERVIREAEDLLRRWKETIKKVLDDLKRLLDELKKRNEDVIRELTKTKGDEELAKLIKDLLDTNEKVNRDLLRLIKKLLKDAERVNRRLLELIEELLEELKRVAKDLGLREEADKKLRDIADRARKELEDYERRLKELLKTVEDALRKAEEDSRKLKRDVEELLERGRLRKDDLEDILRKNLDRLRKLLERLRELLMSCAQESKKTLKRLEDVVREIL

SEQ ID NO: 27981 - protein, 234 aa, Artificial Sequence
  Synthetic
DADELLRRLAEEVERVIREAEDLLRRWKETIKKVLDDLKRLLDELKKRNEDVIRELTKTKGDEELAKLIKDLLDTNEKVNRDLLRLIKKLLKDAERVNRRLLELIEELLEELKRVAKDLGLREEADKKLRDIADRARKELEDYERRLKELLKTVEDALRKAEEDSRKLKRDVEELLERGRLRKDDLEDILRKNLDRLRKLLERLREILRELMMSCAQESKRLEDVVREILEDLK

SEQ ID NO: 27982 - protein, 223 aa, Artificial Sequence
  Synthetic
DADELLRRLAEEVERVIREAEDLLRRWKETIKKVLDDLKRLLDELKKRNEDVIRELTKTKGDEELAKLIKDLLDTNEKVNRDLLRLIKKLLKDAERVNRRLLELIEELLEELKRVAKDLGLREEADKKLRDIADRARKELEDYERRLKELLKTVEDALRKAEEDSRKLKRDVEELLERGRLRKDDLEDILRKNLDRLRKLIMSCAQESRENLEALKKTLKRLE

SEQ ID NO: 27983 - protein, 226 aa, Artificial Sequence
  Synthetic
DADELLRRLAEEVERVIREAEDLLRRWKETIKKVLDDLKRLLDELKKRNEDVIRELTKTKGDEELAKLIKDLLDTNEKVNRDLLRLIKKLLKDAERVNRRLLELIEELLEELKRVAKDLGLREEADKKLRDIADRARKELEDYERRLKELLKTVEDALRKAEEDSRKLKRDVEELLERGRLRKDDLEDILRKNLDRLRKLLELVMSCAQESLEALKKTLKRLEDVV

SEQ ID NO: 27984 - protein, 234 aa, Artificial Sequence
  Synthetic
DADELLRRLAEEVERVIREAEDLLRRWKETIKKVLDDLKRLLDELKKRNEDVIRELTKTKGDEELAKLIKDLLDTNEKVNRDLLRLIKKLLKDAERVNRRLLELIEELLEELKRVAKDLGLREEADKKLRDIADRARKELEDYERRLKELLKTVEDALRKAEEDSRKLKRDVEELLERGRLRKDDLEDILRKNLDRLRKLLERLREILRELLMSCAQESKRLEDVVREILEDLK

SEQ ID NO: 27985 - protein, 216 aa, Artificial Sequence
  Synthetic
DKAEVLREALKLLKDLLEELIKIHEESLKRILDLIDTLVKVHEDALRALKELLERSGLDERELRKVERMATESLRTIAKLKEELRDLARRSLEKLREDLKRVDDTLRKVEEKVRRTGPSEELIEELIRTIEKLLKEIVRINEEVLKAVRELLKTLLKLSEDVVRRIEEILRKGGVPEEIDRELKRVVEELRRLHMSCAQESDDVARRSEEELRRII

SEQ ID NO: 27986 - protein, 220 aa, Artificial Sequence
  Synthetic
DKAEVLREALKLLKDLLEELIKIHEESLKRILDLIDTLVKVHEDALRALKELLERSGLDERELRKVERMATESLRTIAKLKEELRDLARRSLEKLREDLKRVDDTLRKVEEKVRRTGPSEELIEELIRTIEKLLKEIVRINEEVLKAVRELLKTLLKLSEDVVRRIEEILRKGGVPEEIDRELKRVVEELRRLHEELMMSCAQESRRSEEELRRIIKKLK

SEQ ID NO: 27987 - protein, 223 aa, Artificial Sequence
  Synthetic
DKAEVLREALKLLKDLLEELIKIHEESLKRILDLIDTLVKVHEDALRALKELLERSGLDERELRKVERMATESLRTIAKLKEELRDLARRSLEKLREDLKRVDDTLRKVEEKVRRTGPSEELIEELIRTIEKLLKEIVRINEEVLKAVRELLKTLLKLSEDVVRRIEEILRKGGVPEEIDRELKRVVEELRRLHEEIKELLMSCAQESEEELRRIIKKLKEVV

SEQ ID NO: 27988 - protein, 227 aa, Artificial Sequence
  Synthetic
DKAEVLREALKLLKDLLEELIKIHEESLKRILDLIDTLVKVHEDALRALKELLERSGLDERELRKVERMATESLRTIAKLKEELRDLARRSLEKLREDLKRVDDTLRKVEEKVRRTGPSEELIEELIRTIEKLLKEIVRINEEVLKAVRELLKTLLKLSEDVVRRIEEILRKGGVPEEIDRELKRVVEELRRLHEEIKERLDDLGMSCAQESRRIIKKLKEVVKEIR

SEQ ID NO: 27989 - protein, 231 aa, Artificial Sequence
  Synthetic
DKAEVLREALKLLKDLLEELIKIHEESLKRILDLIDTLVKVHEDALRALKELLERSGLDERELRKVERMATESLRTIAKLKEELRDLARRSLEKLREDLKRVDDTLRKVEEKVRRTGPSEELIEELIRTIEKLLKEIVRINEEVLKAVRELLKTLLKLSEDVVRRIEEILRKGGVPEEIDRELKRVVEELRRLHEEIKERLDDVARRLLMSCAQESKKLKEVVKEIRKKLK

SEQ ID NO: 27990 - protein, 216 aa, Artificial Sequence; identical to SEQ ID NO: 27985
  Synthetic

SEQ ID NO: 27991 - protein, 220 aa, Artificial Sequence
  Synthetic
DKAEVLREALKLLKDLLEELIKIHEESLKRILDLIDTLVKVHEDALRALKELLERSGLDERELRKVERMATESLRTIAKLKEELRDLARRSLEKLREDLKRVDDTLRKVEEKVRRTGPSEELIEELIRTIEKLLKEIVRINEEVLKAVRELLKTLLKLSEDVVRRIEEILRKGGVPEEIDRELKRVVEELRRLHEELKMSCAQESRRSEEELRRIIKKLK

SEQ ID NO: 27992 - protein, 223 aa, Artificial Sequence; identical to SEQ ID NO: 27987
  Synthetic

SEQ ID NO: 27993 - protein, 227 aa, Artificial Sequence
  Synthetic
DKAEVLREALKLLKDLLEELIKIHEESLKRILDLIDTLVKVHEDALRALKELLERSGLDERELRKVERMATESLRTIAKLKEELRDLARRSLEKLREDLKRVDDTLRKVEEKVRRTGPSEELIEELIRTIEKLLKEIVRINEEVLKAVRELLKTLLKLSEDVVRRIEEILRKGGVPEEIDRELKRVVEELRRLHEEIKERLDDLAMSCAQESRRIIKKLKEVVKEIR

SEQ ID NO: 27994 - protein, 231 aa, Artificial Sequence; identical to SEQ ID NO: 27989
  Synthetic

SEQ ID NO: 27995 - protein, 224 aa, Artificial Sequence
  Synthetic
STREKAKKVLDTLRADNEDMKRVVEKILRALKRTNERAEKLAREITEEIKRILKEVGVSEEALKEIEDTLKRVLEEIKRLLDESKKLLEDVEREIREILKTSEELLERIEREIETVGSDEKTLAEILKRLLELNEEMNRRLLKILRDLLRLNEEVIRRLLAVLERLLDALKEALDRGDVPEDLLRKLEEELRRIKEKLRKLLMSCAQESRELEKELDKLHDESR

SEQ ID NO: 27996 - protein, 228 aa, Artificial Sequence
  Synthetic
STREKAKKVLDTLRADNEDMKRVVEKILRALKRTNERAEKLAREITEEIKRILKEVGVSEEALKEIEDTLKRVLEEIKRLLDESKKLLEDVEREIREILKTSEELLERIEREIETVGSDEKTLAEILKRLLELNEEMNRRLLKILRDLLRLNEEVIRRLLAVLERLLDALKEALDRGDVPEDLLRKLEEELRRIKEKLRKALEELVMSCAQESKELDKLHDESRKEHE

SEQ ID NO: 27997 - protein, 231 aa, Artificial Sequence
  Synthetic
STREKAKKVLDTLRADNEDMKRVVEKILRALKRTNERAEKLAREITEEIKRILKEVGVSEEALKEIEDTLKRVLEEIKRLLDESKKLLEDVEREIREILKTSEELLERIEREIETVGSDEKTLAEILKRLLELNEEMNRRLLKILRDLLRLNEEVIRRLLAVLERLLDALKEALDRGDVPEDLLRKLEEELRRIKEKLRKALEELERLHMSCAQESDKLHDESRKEHERIE

SEQ ID NO: 27998 - protein, 235 aa, Artificial Sequence
  Synthetic
STREKAKKVLDTLRADNEDMKRVVEKILRALKRTNERAEKLAREITEEIKRILKEVGVSEEALKEIEDTLKRVLEEIKRLLDESKKLLEDVEREIREILKTSEELLERIEREIETVGSDEKTLAEILKRLLELNEEMNRRLLKILRDLLRLNEEVIRRLLAVLERLLDALKEALDRGDVPEDLLRKLEEELRRIKEKLRKALEELEREHRELKMSCAQESDESRKEHERIEEELR

SEQ ID NO: 27999 - protein, 224 aa, Artificial Sequence; identical to SEQ ID NO: 27995
  Synthetic

SEQ ID NO: 28000 - protein, 228 aa, Artificial Sequence; identical to SEQ ID NO: 27996
  Synthetic

SEQ ID NO: 28001 - protein, 231 aa, Artificial Sequence; identical to SEQ ID NO: 27997
  Synthetic

SEQ ID NO: 28002 - protein, 235 aa, Artificial Sequence; identical to SEQ ID NO: 27998
  Synthetic

SEQ ID NO: 28003 - protein, 232 aa, Artificial Sequence
  Synthetic
SKAEKLLKDLREALEKVKRRYEELERRLDEVLKEHEEIVKRLLEELEKVLKRIEEGGLPEEELEKLKKLAEKVKELLRELLRLSKELVDRVRELLKRDLDLVRRLVEIALKVLREAREQPNDEKRVEKIKRDLEKKARRVREENERIKRDLKRTADESRKRLEKLLEDLKRELDRLREDLDRGRKDIDERVEELIERLIRIIERLLRELCMSCAQESRTIERLIEESIRVNE

SEQ ID NO: 28004 - protein, 235 aa, Artificial Sequence
  Synthetic
SKAEKLLKDLREALEKVKRRYEELERRLDEVLKEHEEIVKRLLEELEKVLKRIEEGGLPEEELEKLKKLAEKVKELLRELLRLSKELVDRVRELLKRDLDLVRRLVEIALKVLREAREQPNDEKRVEKIKRDLEKKARRVREENERIKRDLKRTADESRKRLEKLLEDLKRELDRLREDLDRGRKDIDERVEELIERLIRIIERLLREVIKLHMSCAQESERLIEESIRVNEELL

SEQ ID NO: 28005 - protein, 242 aa, Artificial Sequence
  Synthetic
SKAEKLLKDLREALEKVKRRYEELERRLDEVLKEHEEIVKRLLEELEKVLKRIEEGGLPEEELEKLKKLAEKVKELLRELLRLSKELVDRVRELLKRDLDLVRRLVEIALKVLREAREQPNDEKRVEKIKRDLEKKARRVREENERIKRDLKRTADESRKRLEKLLEDLKRELDRLREDLDRGRKDIDERVEELIERLIRIIERLLREVIKSHEKLVRLCMSCAQESIRVNEELLEVIERLL

SEQ ID NO: 28006 - protein, 243 aa, Artificial Sequence
  Synthetic
SKAEKLLKDLREALEKVKRRYEELERRLDEVLKEHEEIVKRLLEELEKVLKRIEEGGLPEEELEKLKKLAEKVKELLRELLRLSKELVDRVRELLKRDLDLVRRLVEIALKVLREAREQPNDEKRVEKIKRDLEKKARRVREENERIKRDLKRTADESRKRLEKLLEDLKRELDRLREDLDRGRKDIDERVEELIERLIRIIERLLREVIKSHEKLVRTLEMSCAQESRVNEELLEVIERLLD

SEQ ID NO: 28007 - protein, 246 aa, Artificial Sequence
  Synthetic
SKAEKLLKDLREALEKVKRRYEELERRLDEVLKEHEEIVKRLLEELEKVLKRIEEGGLPEEELEKLKKLAEKVKELLRELLRLSKELVDRVRELLKRDLDLVRRLVEIALKVLREAREQPNDEKRVEKIKRDLEKKARRVREENERIKRDLKRTADESRKRLEKLLEDLKRELDRLREDLDRGRKDIDERVEELIERLIRIIERLLREVIKSHEKLVRTIERLIMSCAQESEELLEVIERLLDRAR

SEQ ID NO: 28008 - protein, 235 aa, Artificial Sequence; identical to SEQ ID NO: 28004
  Synthetic

SEQ ID NO: 28009 - protein, 242 aa, Artificial Sequence
  Synthetic
SKAEKLLKDLREALEKVKRRYEELERRLDEVLKEHEEIVKRLLEELEKVLKRIEEGGLPEEELEKLKKLAEKVKELLRELLRLSKELVDRVRELLKRDLDLVRRLVEIALKVLREAREQPNDEKRVEKIKRDLEKKARRVREENERIKRDLKRTADESRKRLEKLLEDLKRELDRLREDLDRGRKDIDERVEELIERLIRIIERLLREVIKSHEKLVRLIMSCAQESIRVNEELLEVIERLL

SEQ ID NO: 28010 - protein, 246 aa, Artificial Sequence; identical to SEQ ID NO: 28007
  Synthetic

SEQ ID NO: 28011 - protein, 228 aa, Artificial Sequence
  Synthetic
DLERVVEDIVDKAKRLLDKNLEVLKRIVDEVLRLLERLLRESRKVVKRVKEIIEELVRDEKELRRVKRALEEVLRRHEEIAKELKERLRKVAKEAEEKHKKLVEDLKRVVDEVRKKLSGPLDREKVLEVLDELVTIIAKLLDENIKVLEEVIRVIAELLERLLDSHRRLIDIIAKLLEGLRPGDEDLLTELEKKLRKLKRDSEKLVMSCAQESERIKREVKRLIEENA

SEQ ID NO: 28012 - protein, 232 aa, Artificial Sequence
  Synthetic
DLERVVEDIVDKAKRLLDKNLEVLKRIVDEVLRLLERLLRESRKVVKRVKEIIEELVRDEKELRRVKRALEEVLRRHEEIAKELKERLRKVAKEAEEKHKKLVEDLKRVVDEVRKKLSGPLDREKVLEVLDELVTIIAKLLDENIKVLEEVIRVIAELLERLLDSHRRLIDIIAKLLEGLRPGDEDLLTELEKKLRKLKRDSEKVVDDLKMSCAQESREVKRLIEENARTLA

SEQ ID NO: 28013 - protein, 239 aa, Artificial Sequence
  Synthetic
DLERVVEDIVDKAKRLLDKNLEVLKRIVDEVLRLLERLLRESRKVVKRVKEIIEELVRDEKELRRVKRALEEVLRRHEEIAKELKERLRKVAKEAEEKHKKLVEDLKRVVDEVRKKLSGPLDREKVLEVLDELVTIIAKLLDENIKVLEEVIRVIAELLERLLDSHRRLIDIIAKLLEGLRPGDEDLLTELEKKLRKLKRDSEKVVDDLKKELERLKMSCAQESEENARTLADIKRAVD

SEQ ID NO: 28014 - protein, 228 aa, Artificial Sequence; identical to SEQ ID NO: 28011
  Synthetic

SEQ ID NO: 28015 - protein, 232 aa, Artificial Sequence
  Synthetic
DLERVVEDIVDKAKRLLDKNLEVLKRIVDEVLRLLERLLRESRKVVKRVKEIIEELVRDEKELRRVKRALEEVLRRHEEIAKELKERLRKVAKEAEEKHKKLVEDLKRVVDEVRKKLSGPLDREKVLEVLDELVTIIAKLLDENIKVLEEVIRVIAELLERLLDSHRRLIDIIAKLLEGLRPGDEDLLTELEKKLRKLKRDSEKVVDDLRMSCAQESREVKRLIEENARTLA

SEQ ID NO: 28016 - protein, 234 aa, Artificial Sequence
  Synthetic
SERELIERWLELHKEILRLIRELVERLLKLHREILDTIKKLIRELLELLEDIARKLGLDKEAKDELREIAKRVEDKLEKLERESRKVEEDLKRKLKELTDESDTVEKRVRDVVRRGTQSREEIAEELLRLDRKLLKAVEELLKEILDLNKKLLDDVRAILEETRRVLEKLLDRVRRGERTDDERRTLTELLKRMEDILEKVERTLKKLLDLAMSCAQESKKTLKELLERSEKVA

SEQ ID NO: 28017 - protein, 235 aa, Artificial Sequence
  Synthetic
SERELIERWLELHKEILRLIRELVERLLKLHREILDTIKKLIRELLELLEDIARKLGLDKEAKDELREIAKRVEDKLEKLERESRKVEEDLKRKLKELTDESDTVEKRVRDVVRRGTQSREEIAEELLRLDRKLLKAVEELLKEILDLNKKLLDDVRAILEETRRVLEKLLDRVRRGERTDDERRTLTELLKRMEDILEKVERTLKKLLDDLLMSCAQESKTLKELLERSEKVAE

SEQ ID NO: 28018 - protein, 238 aa, Artificial Sequence
  Synthetic
SERELIERWLELHKEILRLIRELVERLLKLHREILDTIKKLIRELLELLEDIARKLGLDKEAKDELREIAKRVEDKLEKLERESRKVEEDLKRKLKELTDESDTVEKRVRDVVRRGTQSREEIAEELLRLDRKLLKAVEELLKEILDLNKKLLDDVRAILEETRRVLEKLLDRVRRGERTDDERRTLTELLKRMEDILEKVERTLKKLLDDSARLAMSCAQESKELLERSEKVAEDVR

SEQ ID NO: 28019 - protein, 224 aa, Artificial Sequence
  Synthetic
SERELIERWLELHKEILRLIRELVERLLKLHREILDTIKKLIRELLELLEDIARKLGLDKEAKDELREIAKRVEDKLEKLERESRKVEEDLKRKLKELTDESDTVEKRVRDVVRRGTQSREEIAEELLRLDRKLLKAVEELLKEILDLNKKLLDDVRAILEETRRVLEKLLDRVRRGERTDDERRTLTELLKRMEDILEKLEMSCAQESDDSARMAEEVKKTLK

SEQ ID NO: 28020 - protein, 227 aa, Artificial Sequence
  Synthetic
SERELIERWLELHKEILRLIRELVERLLKLHREILDTIKKLIRELLELLEDIARKLGLDKEAKDELREIAKRVEDKLEKLERESRKVEEDLKRKLKELTDESDTVEKRVRDVVRRGTQSREEIAEELLRLDRKLLKAVEELLKEILDLNKKLLDDVRAILEETRRVLEKLLDRVRRGERTDDERRTLTELLKRMEDILEKVERLLMSCAQESARMAEEVKKTLKELL

SEQ ID NO: 28021 - protein, 231 aa, Artificial Sequence
  Synthetic
SERELIERWLELHKEILRLIRELVERLLKLHREILDTIKKLIRELLELLEDIARKLGLDKEAKDELREIAKRVEDKLEKLERESRKVEEDLKRKLKELTDESDTVEKRVRDVVRRGTQSREEIAEELLRLDRKLLKAVEELLKEILDLNKKLLDDVRAILEETRRVLEKLLDRVRRGERTDDERRTLTELLKRMEDILEKVERTLKKLLMSCAQESEEVKKTLKELLERSE

SEQ ID NO: 28022 - protein, 234 aa, Artificial Sequence; identical to SEQ ID NO: 28016
  Synthetic

SEQ ID NO: 28023 - protein, 235 aa, Artificial Sequence
  Synthetic
SERELIERWLELHKEILRLIRELVERLLKLHREILDTIKKLIRELLELLEDIARKLGLDKEAKDELREIAKRVEDKLEKLERESRKVEEDLKRKLKELTDESDTVEKRVRDVVRRGTQSREEIAEELLRLDRKLLKAVEELLKEILDLNKKLLDDVRAILEETRRVLEKLLDRVRRGERTDDERRTLTELLKRMEDILEKVERTLKKLLDDLKMSCAQESKTLKELLERSEKVAE

SEQ ID NO: 28024 - protein, 238 aa, Artificial Sequence; identical to SEQ ID NO: 28018
  Synthetic

SEQ ID NO: 28025 - protein, 229 aa, Artificial Sequence
  Synthetic
KKEEDLRREVEEVKEEIRELIERSRESVRRILKEIKDLIRKSKESIDKILEDLKRKNLDETLIRAVEKLLRENLELLKKLLETVKELLERNEELLKRLVEEAERILEELLEVARRSGDEKALERVVREVEKELKRLDDELKKALKDSEEELKRLEDELRRAKEENEKTLKKLRDDLRREGRDEEVLRVVEELLKLLKEHLEENVRLAMSCAQESRRHHDTNRKIVKRIL

SEQ ID NO: 28026 - protein, 230 aa, Artificial Sequence
  Synthetic
KKEEDLRREVEEVKEEIRELIERSRESVRRILKEIKDLIRKSKESIDKILEDLKRKNLDETLIRAVEKLLRENLELLKKLLETVKELLERNEELLKRLVEEAERILEELLEVARRSGDEKALERVVREVEKELKRLDDELKKALKDSEEELKRLEDELRRAKEENEKTLKKLRDDLRREGRDEEVLRVVEELLKLLKEHLEENVRILRMSCAQESRHHDTNRKIVKRILE

SEQ ID NO: 28027 - protein, 237 aa, Artificial Sequence
  Synthetic
KKEEDLRREVEEVKEEIRELIERSRESVRRILKEIKDLIRKSKESIDKILEDLKRKNLDETLIRAVEKLLRENLELLKKLLETVKELLERNEELLKRLVEEAERILEELLEVARRSGDEKALERVVREVEKELKRLDDELKKALKDSEEELKRLEDELRRAKEENEKTLKKLRDDLRREGRDEEVLRVVEELLKLLKEHLEENVRILRRILELLRMSCAQESKIVKRILELLRRVLE

SEQ ID NO: 28028 - protein, 239 aa, Artificial Sequence
  Synthetic
KKEEDLRREVEEVKEEIRELIERSRESVRRILKEIKDLIRKSKESIDKILEDLKRKNLDETLIRAVEKLLRENLELLKKLLETVKELLERNEELLKRLVEEAERILEELLEVARRSGDEKALERVVREVEKELKRLDDELKKALKDSEEELKRLEDELRRAKEENEKTLKKLRDDLRREGRDEEVLRVVEELLKLLKEHLEENVRILRRILELLRLHMSCAQESVKRILELLRRVLESI

SEQ ID NO: 28029 - protein, 240 aa, Artificial Sequence
  Synthetic
KKEEDLRREVEEVKEEIRELIERSRESVRRILKEIKDLIRKSKESIDKILEDLKRKNLDETLIRAVEKLLRENLELLKKLLETVKELLERNEELLKRLVEEAERILEELLEVARRSGDEKALERVVREVEKELKRLDDELKKALKDSEEELKRLEDELRRAKEENEKTLKKLRDDLRREGRDEEVLRVVEELLKLLKEHLEENVRILRRILELLRRLGMSCAQESKRILELLRRVLESIR

SEQ ID NO: 28030 - protein, 229 aa, Artificial Sequence
  Synthetic
KKEEDLRREVEEVKEEIRELIERSRESVRRILKEIKDLIRKSKESIDKILEDLKRKNLDETLIRAVEKLLRENLELLKKLLETVKELLERNEELLKRLVEEAERILEELLEVARRSGDEKALERVVREVEKELKRLDDELKKALKDSEEELKRLEDELRRAKEENEKTLKKLRDDLRREGRDEEVLRVVEELLKLLKEHLEENVRLVMSCAQESRRHHDTNRKIVKRIL

SEQ ID NO: 28031 - protein, 237 aa, Artificial Sequence; identical to SEQ ID NO: 28027
  Synthetic

SEQ ID NO: 28032 - protein, 239 aa, Artificial Sequence; identical to SEQ ID NO: 28028
  Synthetic

SEQ ID NO: 28033 - protein, 240 aa, Artificial Sequence
  Synthetic
KKEEDLRREVEEVKEEIRELIERSRESVRRILKEIKDLIRKSKESIDKILEDLKRKNLDETLIRAVEKLLRENLELLKKLLETVKELLERNEELLKRLVEEAERILEELLEVARRSGDEKALERVVREVEKELKRLDDELKKALKDSEEELKRLEDELRRAKEENEKTLKKLRDDLRREGRDEEVLRVVEELLKLLKEHLEENVRILRRILELLRRLHMSCAQESKRILELLRRVLESIR

SEQ ID NO: 28034 - protein, 226 aa, Artificial Sequence
  Synthetic
SKKELLEEVVRRAIELLKRHLEKLKRILEEIVRLLEEHLEKVERVLEAILSLLDDLLRRGGDERAIRTLEDVKRRLREILERLADENAKAIKRLADLLDKLEKRNKEAIERLEEILEELKRVRRDEELLRVLETLLKIIEDILRENTKVLEDLLRLVEEILEANLRVVEELLRLAREILTEIVGDEDKLKEIEDELRRLLEELQMSCAQESDRLRELKKDLDEANR

SEQ ID NO: 28035 - protein, 229 aa, Artificial Sequence
  Synthetic
SKKELLEEVVRRAIELLKRHLEKLKRILEEIVRLLEEHLEKVERVLEAILSLLDDLLRRGGDERAIRTLEDVKRRLREILERLADENAKAIKRLADLLDKLEKRNKEAIERLEEILEELKRVRRDEELLRVLETLLKIIEDILRENTKVLEDLLRLVEEILEANLRVVEELLRLAREILTEIVGDEDKLKEIEDELRRLLEELRRLVMSCAQESRELKKDLDEANRRIK

SEQ ID NO: 28036 - protein, 233 aa, Artificial Sequence
  Synthetic
SKKELLEEVVRRAIELLKRHLEKLKRILEEIVRLLEEHLEKVERVLEAILSLLDDLLRRGGDERAIRTLEDVKRRLREILERLADENAKAIKRLADLLDKLEKRNKEAIERLEEILEELKRVRRDEELLRVLETLLKIIEDILRENTKVLEDLLRLVEEILEANLRVVEELLRLAREILTEIVGDEDKLKEIEDELRRLLEELRRLDKALKMSCAQESKDLDEANRRIKETLK

SEQ ID NO: 28037 - protein, 240 aa, Artificial Sequence
  Synthetic
SKKELLEEVVRRAIELLKRHLEKLKRILEEIVRLLEEHLEKVERVLEAILSLLDDLLRRGGDERAIRTLEDVKRRLREILERLADENAKAIKRLADLLDKLEKRNKEAIERLEEILEELKRVRRDEELLRVLETLLKIIEDILRENTKVLEDLLRLVEEILEANLRVVEELLRLAREILTEIVGDEDKLKEIEDELRRLLEELRRLDKAIKDRLRELYMSCAQESRRIKETLKKLLREVE

SEQ ID NO: 28038 - protein, 233 aa, Artificial Sequence; identical to SEQ ID NO: 28036
  Synthetic

SEQ ID NO: 28039 - protein, 240 aa, Artificial Sequence
  Synthetic
SKKELLEEVVRRAIELLKRHLEKLKRILEEIVRLLEEHLEKVERVLEAILSLLDDLLRRGGDERAIRTLEDVKRRLREILERLADENAKAIKRLADLLDKLEKRNKEAIERLEEILEELKRVRRDEELLRVLETLLKIIEDILRENTKVLEDLLRLVEEILEANLRVVEELLRLAREILTEIVGDEDKLKEIEDELRRLLEELRRLDKAIKDRLRELKMSCAQESRRIKETLKKLLREVE

SEQ ID NO: 28040 - protein, 226 aa, Artificial Sequence
  Synthetic
SKEELVKEIDELNKRVNDLLEELLRKSEKLHKEILELLERLLREIISLLRRILEIVERRLEDETLKRVLEKLEETLRRLKKKVDEELKRLEDENRRLKEEMDRLLRKSAEELERLREKVVRDGGSGDEVLARLLELHTEDLKHAREVLDEVLRLNKKALDLIRAILTEVLKLIKELLKLIEAGADEDELRRLLEDIERKIEALLMSCAQESEEIRKRIRELLEDNR

SEQ ID NO: 28041 - protein, 237 aa, Artificial Sequence
  Synthetic
SKEELVKEIDELNKRVNDLLEELLRKSEKLHKEILELLERLLREIISLLRRILEIVERRLEDETLKRVLEKLEETLRRLKKKVDEELKRLEDENRRLKEEMDRLLRKSAEELERLREKVVRDGGSGDEVLARLLELHTEDLKHAREVLDEVLRLNKKALDLIRAILTEVLKLIKELLKLIEAGADEDELRRLLEDIERKIEALLRELKKESEELLMSCAQESEDNRDKSRKIKKAIE

SEQ ID NO: 28042 - protein, 241 aa, Artificial Sequence
  Synthetic
SKEELVKEIDELNKRVNDLLEELLRKSEKLHKEILELLERLLREIISLLRRILEIVERRLEDETLKRVLEKLEETLRRLKKKVDEELKRLEDENRRLKEEMDRLLRKSAEELERLREKVVRDGGSGDEVLARLLELHTEDLKHAREVLDEVLRLNKKALDLIRAILTEVLKLIKELLKLIEAGADEDELRRLLEDIERKIEALLRELKKESEEIRKRLKMSCAQESDKSRKIKKAIEELKK

SEQ ID NO: 28043 - protein, 233 aa, Artificial Sequence
  Synthetic
SKEELVKEIDELNKRVNDLLEELLRKSEKLHKEILELLERLLREIISLLRRILEIVERRLEDETLKRVLEKLEETLRRLKKKVDEELKRLEDENRRLKEEMDRLLRKSAEELERLREKVVRDGGSGDEVLARLLELHTEDLKHAREVLDEVLRLNKKALDLIRAILTEVLKLIKELLKLIEAGADEDELRRLLEDIERKIEALLRELKKLAMSCAQESRELLEDNRDKSRKIK

SEQ ID NO: 28044 - protein, 237 aa, Artificial Sequence; identical to SEQ ID NO: 28041
  Synthetic

SEQ ID NO: 28045 - protein, 241 aa, Artificial Sequence; identical to SEQ ID NO: 28042
  Synthetic

SEQ ID NO: 28046 - protein, 231 aa, Artificial Sequence
  Synthetic
KEIEETLKELEDLNREMVETNRRVLEETRRLNKETVDRVKATLDELAKMLKKLVDDVRKGPTSEELKRLLAELEELLARVVRRVEELLKKSTDLLERAVKDSADALRRSHEVLKEVASRVKRAKDEGLPREEVLRLLRELLERHAKVLKDIVRVSEKLLREHLKVLREIVEVLEELLERILKVILDTTGGDKAVEELEKALEEIKRRLTMSCAQESDELRKLRKEYKEKID

SEQ ID NO: 28047 - protein, 231 aa, Artificial Sequence
  Synthetic
KEIEETLKELEDLNREMVETNRRVLEETRRLNKETVDRVKATLDELAKMLKKLVDDVRKGPTSEELKRLLAELEELLARVVRRVEELLKKSTDLLERAVKDSADALRRSHEVLKEVASRVKRAKDEGLPREEVLRLLRELLERHAKVLKDIVRVSEKLLREHLKVLREIVEVLEELLERILKVILDTTGGDKAVEELEKALEEIKRRLEMSCAQESDELRKLRKEYKEKID

SEQ ID NO: 28048 - protein, 245 aa, Artificial Sequence
  Synthetic
KEIEETLKELEDLNREMVETNRRVLEETRRLNKETVDRVKATLDELAKMLKKLVDDVRKGPTSEELKRLLAELEELLARVVRRVEELLKKSTDLLERAVKDSADALRRSHEVLKEVASRVKRAKDEGLPREEVLRLLRELLERHAKVLKDIVRVSEKLLREHLKVLREIVEVLEELLERILKVILDTTGGDKAVEELEKALEEIKRRLKEVIDRYEDELRKLMMSCAQESDKYERKLEEIERRER

SEQ ID NO: 28049 - protein, 216 aa, Artificial Sequence
  Synthetic
SKEEEVEKVLRKWEEILRRLIEENKRANDKIRREYEELVKEIRRVLEEIKEVAERLGVSEEVKRILEKLIKLLEDILEYEKENVERLIELNERILRELKKSVEELKALVTRVRRDGLPESEVRKLVEDVLRKNEELLKEAKKAWRDSIENLKRVLEEVAKLVKTVLREIEEKIDDEDVVRALIEVIERLLRVLAMSCAQESKVNTELMRVDERSIR

SEQ ID NO: 28050 - protein, 220 aa, Artificial Sequence
  Synthetic
SKEEEVEKVLRKWEEILRRLIEENKRANDKIRREYEELVKEIRRVLEEIKEVAERLGVSEEVKRILEKLIKLLEDILEYEKENVERLIELNERILRELKKSVEELKALVTRVRRDGLPESEVRKLVEDVLRKNEELLKEAKKAWRDSIENLKRVLEEVAKLVKTVLREIEEKIDDEDVVRALIEVIERLLRVAEEVLRMSCAQESELMRVDERSIRESLK

SEQ ID NO: 28051 - protein, 223 aa, Artificial Sequence
  Synthetic
SKEEEVEKVLRKWEEILRRLIEENKRANDKIRREYEELVKEIRRVLEEIKEVAERLGVSEEVKRILEKLIKLLEDILEYEKENVERLIELNERILRELKKSVEELKALVTRVRRDGLPESEVRKLVEDVLRKNEELLKEAKKAWRDSIENLKRVLEEVAKLVKTVLREIEEKIDDEDVVRALIEVIERLLRVAEEVIRRLIMSCAQESRVDERSIRESLKAIS

SEQ ID NO: 28052 - protein, 226 aa, Artificial Sequence
  Synthetic
SKEEEVEKVLRKWEEILRRLIEENKRANDKIRREYEELVKEIRRVLEEIKEVAERLGVSEEVKRILEKLIKLLEDILEYEKENVERLIELNERILRELKKSVEELKALVTRVRRDGLPESEVRKLVEDVLRKNEELLKEAKKAWRDSIENLKRVLEEVAKLVKTVLREIEEKIDDEDVVRALIEVIERLLRVAEEVIRRILKLVMSCAQESERSIRESLKAISEVL

SEQ ID NO: 28053 - protein, 229 aa, Artificial Sequence
  Synthetic
SKEEEVEKVLRKWEEILRRLIEENKRANDKIRREYEELVKEIRRVLEEIKEVAERLGVSEEVKRILEKLIKLLEDILEYEKENVERLIELNERILRELKKSVEELKALVTRVRRDGLPESEVRKLVEDVLRKNEELLKEAKKAWRDSIENLKRVLEEVAKLVKTVLREIEEKIDDEDVVRALIEVIERLLRVAEEVIRRILKVNTLAMSCAQESIRESLKAISEVLKVL

SEQ ID NO: 28054 - protein, 216 aa, Artificial Sequence
  Synthetic
SKEEEVEKVLRKWEEILRRLIEENKRANDKIRREYEELVKEIRRVLEEIKEVAERLGVSEEVKRILEKLIKLLEDILEYEKENVERLIELNERILRELKKSVEELKALVTRVRRDGLPESEVRKLVEDVLRKNEELLKEAKKAWRDSIENLKRVLEEVAKLVKTVLREIEEKIDDEDVVRALIEVIERLLRVLIMSCAQESKVNTELMRVDERSIR

SEQ ID NO: 28055 - protein, 220 aa, Artificial Sequence; identical to SEQ ID NO: 28050
  Synthetic

SEQ ID NO: 28056 - protein, 223 aa, Artificial Sequence; identical to SEQ ID NO: 28051
  Synthetic

SEQ ID NO: 28057 - protein, 226 aa, Artificial Sequence; identical to SEQ ID NO: 28052
  Synthetic

SEQ ID NO: 28058 - protein, 229 aa, Artificial Sequence; identical to SEQ ID NO: 28053
  Synthetic

SEQ ID NO: 28059 - protein, 230 aa, Artificial Sequence
  Synthetic
DEDELIRKLLEDLKDIVRKILELIERDLRDIERVVRRIVKVIRDDLKKIKEVVDDIARGVPRTEELERVIKRIEELLRTSEEELDRILKEIEELLRESRRRLEEVVSAVEELLRRVEEIVDKGRESKEDVIKLLREVVDDILRLVEEVVRTNLEIIKRILELIERVIRLNLSIIRDILRLLEGTVDSELADRIRKLIEDLERHTAKLLMSCAQESTELRKNSKDILEEVR

SEQ ID NO: 28060 - protein, 237 aa, Artificial Sequence
  Synthetic
DEDELIRKLLEDLKDIVRKILELIERDLRDIERVVRRIVKVIRDDLKKIKEVVDDIARGVPRTEELERVIKRIEELLRTSEEELDRILKEIEELLRESRRRLEEVVSAVEELLRRVEEIVDKGRESKEDVIKLLREVVDDILRLVEEVVRTNLEIIKRILELIERVIRLNLSIIRDILRLLEGTVDSELADRIRKLIEDLERHTAKVLEDVKRLMMSCAQESKDILEEVRKLIDELR

SEQ ID NO: 28061 - protein, 238 aa, Artificial Sequence
  Synthetic
DEDELIRKLLEDLKDIVRKILELIERDLRDIERVVRRIVKVIRDDLKKIKEVVDDIARGVPRTEELERVIKRIEELLRTSEEELDRILKEIEELLRESRRRLEEVVSAVEELLRRVEEIVDKGRESKEDVIKLLREVVDDILRLVEEVVRTNLEIIKRILELIERVIRLNLSIIRDILRLLEGTVDSELADRIRKLIEDLERHTAKVLEDVKRALSMSCAQESDILEEVRKLIDELRK

SEQ ID NO: 28062 - protein, 241 aa, Artificial Sequence
  Synthetic
DEDELIRKLLEDLKDIVRKILELIERDLRDIERVVRRIVKVIRDDLKKIKEVVDDIARGVPRTEELERVIKRIEELLRTSEEELDRILKEIEELLRESRRRLEEVVSAVEELLRRVEEIVDKGRESKEDVIKLLREVVDDILRLVEEVVRTNLEIIKRILELIERVIRLNLSIIRDILRLLEGTVDSELADRIRKLIEDLERHTAKVLEDVKRAITELAMSCAQESEEVRKLIDELRKRIK

SEQ ID NO: 28063 - protein, 244 aa, Artificial Sequence
  Synthetic
DEDELIRKLLEDLKDIVRKILELIERDLRDIERVVRRIVKVIRDDLKKIKEVVDDIARGVPRTEELERVIKRIEELLRTSEEELDRILKEIEELLRESRRRLEEVVSAVEELLRRVEEIVDKGRESKEDVIKLLREVVDDILRLVEEVVRTNLEIIKRILELIERVIRLNLSIIRDILRLLEGTVDSELADRIRKLIEDLERHTAKVLEDVKRAITELRKLAMSCAQESRKLIDELRKRIKEVE

SEQ ID NO: 28064 - protein, 230 aa, Artificial Sequence; identical to SEQ ID NO: 28059
  Synthetic

SEQ ID NO: 28065 - protein, 237 aa, Artificial Sequence
  Synthetic
DEDELIRKLLEDLKDIVRKILELIERDLRDIERVVRRIVKVIRDDLKKIKEVVDDIARGVPRTEELERVIKRIEELLRTSEEELDRILKEIEELLRESRRRLEEVVSAVEELLRRVEEIVDKGRESKEDVIKLLREVVDDILRLVEEVVRTNLEIIKRILELIERVIRLNLSIIRDILRLLEGTVDSELADRIRKLIEDLERHTAKVLEDVKRLIMSCAQESKDILEEVRKLIDELR

SEQ ID NO: 28066 - protein, 241 aa, Artificial Sequence
  Synthetic
DEDELIRKLLEDLKDIVRKILELIERDLRDIERVVRRIVKVIRDDLKKIKEVVDDIARGVPRTEELERVIKRIEELLRTSEEELDRILKEIEELLRESRRRLEEVVSAVEELLRRVEEIVDKGRESKEDVIKLLREVVDDILRLVEEVVRTNLEIIKRILELIERVIRLNLSIIRDILRLLEGTVDSELADRIRKLIEDLERHTAKVLEDVKRAITELLMSCAQESEEVRKLIDELRKRIK

SEQ ID NO: 28067 - protein, 232 aa, Artificial Sequence
  Synthetic
RDRDVLRKVKAEIEELVARIEKVSRDALSEVKRLLDENRKIAEDVLRLIESLLRKIRDTRGDDEVVKETEEVLRDNHRLLEELIRRLIKVLEEWLRRHKKLLDEIRELLKEILRLVKESGVSEDLLRRLKRVIEELDKKLKESEEKLRRVVEKAKEDLKAVLEEHRKVLEDLKRALEEVREKLRERGSEEVVEELLRMLKRVAEEMKRLHMSCAQESEKVVRDVVRVDKELL

SEQ ID NO: 28068 - protein, 233 aa, Artificial Sequence
  Synthetic
RDRDVLRKVKAEIEELVARIEKVSRDALSEVKRLLDENRKIAEDVLRLIESLLRKIRDTRGDDEVVKETEEVLRDNHRLLEELIRRLIKVLEEWLRRHKKLLDEIRELLKEILRLVKESGVSEDLLRRLKRVIEELDKKLKESEEKLRRVVEKAKEDLKAVLEEHRKVLEDLKRALEEVREKLRERGSEEVVEELLRMLKRVAEEMKRVLDMSCAQESKVVRDVVRVDKELLD

SEQ ID NO: 28069 - protein, 243 aa, Artificial Sequence
  Synthetic
RDRDVLRKVKAEIEELVARIEKVSRDALSEVKRLLDENRKIAEDVLRLIESLLRKIRDTRGDDEVVKETEEVLRDNHRLLEELIRRLIKVLEEWLRRHKKLLDEIRELLKEILRLVKESGVSEDLLRRLKRVIEELDKKLKESEEKLRRVVEKAKEDLKAVLEEHRKVLEDLKRALEEVREKLRERGSEEVVEELLRMLKRVAEEMKRVHDDLSRAVEKLAMSCAQESKELLDELARILRRLE

SEQ ID NO: 28070 - protein, 244 aa, Artificial Sequence
  Synthetic
RDRDVLRKVKAEIEELVARIEKVSRDALSEVKRLLDENRKIAEDVLRLIESLLRKIRDTRGDDEVVKETEEVLRDNHRLLEELIRRLIKVLEEWLRRHKKLLDEIRELLKEILRLVKESGVSEDLLRRLKRVIEELDKKLKESEEKLRRVVEKAKEDLKAVLEEHRKVLEDLKRALEEVREKLRERGSEEVVEELLRMLKRVAEEMKRVHDDLSRAVEKVLRMSCAQESELLDELARILRRLEE

SEQ ID NO: 28071 - protein, 247 aa, Artificial Sequence
  Synthetic
RDRDVLRKVKAEIEELVARIEKVSRDALSEVKRLLDENRKIAEDVLRLIESLLRKIRDTRGDDEVVKETEEVLRDNHRLLEELIRRLIKVLEEWLRRHKKLLDEIRELLKEILRLVKESGVSEDLLRRLKRVIEELDKKLKESEEKLRRVVEKAKEDLKAVLEEHRKVLEDLKRALEEVREKLRERGSEEVVEELLRMLKRVAEEMKRVHDDLSRAVEKVVRDLVMSCAQESDELARILRRLEEVIT

SEQ ID NO: 28072 - protein, 232 aa, Artificial Sequence; identical to SEQ ID NO: 28067
  Synthetic

SEQ ID NO: 28073 - protein, 233 aa, Artificial Sequence; identical to SEQ ID NO: 28068
  Synthetic

SEQ ID NO: 28074 - protein, 243 aa, Artificial Sequence
  Synthetic
RDRDVLRKVKAEIEELVARIEKVSRDALSEVKRLLDENRKIAEDVLRLIESLLRKIRDTRGDDEVVKETEEVLRDNHRLLEELIRRLIKVLEEWLRRHKKLLDEIRELLKEILRLVKESGVSEDLLRRLKRVIEELDKKLKESEEKLRRVVEKAKEDLKAVLEEHRKVLEDLKRALEEVREKLRERGSEEVVEELLRMLKRVAEEMKRVHDDLSRAVEKLVMSCAQESKELLDELARILRRLE

SEQ ID NO: 28075 - protein, 244 aa, Artificial Sequence; identical to SEQ ID NO: 28070
  Synthetic

SEQ ID NO: 28076 - protein, 246 aa, Artificial Sequence
  Synthetic
RDRDVLRKVKAEIEELVARIEKVSRDALSEVKRLLDENRKIAEDVLRLIESLLRKIRDTRGDDEVVKETEEVLRDNHRLLEELIRRLIKVLEEWLRRHKKLLDEIRELLKEILRLVKESGVSEDLLRRLKRVIEELDKKLKESEEKLRRVVEKAKEDLKAVLEEHRKVLEDLKRALEEVREKLRERGSEEVVEELLRMLKRVAEEMKRVHDDLSRAVEKVVRLGMSCAQESLDELARILRRLEEVI

SEQ ID NO: 28077 - protein, 247 aa, Artificial Sequence; identical to SEQ ID NO: 28071
  Synthetic

SEQ ID NO: 28078 - protein, 216 aa, Artificial Sequence
  Synthetic
SKDEELARLLEELVERWRKIVEDLERDHRRLVKEIRELVERIRKKLEELVDRIRKNGIDERIVRLIEEIAKIIEEVLKEIVKLVERAVRENVRVLRESVRLVAELVETLARLLRGSDERVTEAIKKVLDTSEDLIRRVIKVNEDILREIAKLVEEVLREAERILTEIKKEGDREEIRRILEELKRIVDDVLRLAMSCAQESRDLTRRLAEVAKAVH

SEQ ID NO: 28079 - protein, 224 aa, Artificial Sequence
  Synthetic
SKDEELARLLEELVERWRKIVEDLERDHRRLVKEIRELVERIRKKLEELVDRIRKNGIDERIVRLIEEIAKIIEEVLKEIVKLVERAVRENVRVLRESVRLVAELVETLARLLRGSDERVTEAIKKVLDTSEDLIRRVIKVNEDILREIAKLVEEVLREAERILTEIKKEGDREEIRRILEELKRIVDDVLRIIARILKLLRMSCAQESEVAKAVHKLLEELLR

SEQ ID NO: 28080 - protein, 216 aa, Artificial Sequence; identical to SEQ ID NO: 28078
  Synthetic

SEQ ID NO: 28081 - protein, 217 aa, Artificial Sequence
  Synthetic
SKDEELARLLEELVERWRKIVEDLERDHRRLVKEIRELVERIRKKLEELVDRIRKNGIDERIVRLIEEIAKIIEEVLKEIVKLVERAVRENVRVLRESVRLVAELVETLARLLRGSDERVTEAIKKVLDTSEDLIRRVIKVNEDILREIAKLVEEVLREAERILTEIKKEGDREEIRRILEELKRIVDDVLRILAMSCAQESDLTRRLAEVAKAVHK

SEQ ID NO: 28082 - protein, 220 aa, Artificial Sequence
  Synthetic
SKDEELARLLEELVERWRKIVEDLERDHRRLVKEIRELVERIRKKLEELVDRIRKNGIDERIVRLIEEIAKIIEEVLKEIVKLVERAVRENVRVLRESVRLVAELVETLARLLRGSDERVTEAIKKVLDTSEDLIRRVIKVNEDILREIAKLVEEVLREAERILTEIKKEGDREEIRRILEELKRIVDDVLRIIARLLMSCAQESRRLAEVAKAVHKLLE

SEQ ID NO: 28083 - protein, 220 aa, Artificial Sequence
  Synthetic
SAAETVKRLAEESSERIRKIVEDDKRVADDSSRKIKELIEEIKRRVKELLDRIKGLGSTEDLEKLLDELLKEVKRLLEELLDAHAKWSDDSRRLLEAVLRTHKELIDRLIKLLRDGGKPEEAVRRLEKVLRESLRRVKEVIKELIDLNKETLDRLKKIVEDLERVLREVLTELRRGSDSKEAVIRLIEELVKLLEDLLMSCAQESETLVELNKRVWDRLV

SEQ ID NO: 28084 - protein, 223 aa, Artificial Sequence
  Synthetic
SAAETVKRLAEESSERIRKIVEDDKRVADDSSRKIKELIEEIKRRVKELLDRIKGLGSTEDLEKLLDELLKEVKRLLEELLDAHAKWSDDSRRLLEAVLRTHKELIDRLIKLLRDGGKPEEAVRRLEKVLRESLRRVKEVIKELIDLNKETLDRLKKIVEDLERVLREVLTELRRGSDSKEAVIRLIEELVKLLEDVLRLAMSCAQESVELNKRVWDRLVRIN

SEQ ID NO: 28085 - protein, 224 aa, Artificial Sequence
  Synthetic
SAAETVKRLAEESSERIRKIVEDDKRVADDSSRKIKELIEEIKRRVKELLDRIKGLGSTEDLEKLLDELLKEVKRLLEELLDAHAKWSDDSRRLLEAVLRTHKELIDRLIKLLRDGGKPEEAVRRLEKVLRESLRRVKEVIKELIDLNKETLDRLKKIVEDLERVLREVLTELRRGSDSKEAVIRLIEELVKLLEDVLRRLLMSCAQESELNKRVWDRLVRINE

SEQ ID NO: 28086 - protein, 231 aa, Artificial Sequence
  Synthetic
SAAETVKRLAEESSERIRKIVEDDKRVADDSSRKIKELIEEIKRRVKELLDRIKGLGSTEDLEKLLDELLKEVKRLLEELLDAHAKWSDDSRRLLEAVLRTHKELIDRLIKLLRDGGKPEEAVRRLEKVLRESLRRVKEVIKELIDLNKETLDRLKKIVEDLERVLREVLTELRRGSDSKEAVIRLIEELVKLLEDVLRRLLEVNETLVMSCAQESDRLVRINEELAEVAL

SEQ ID NO: 28087 - protein, 220 aa, Artificial Sequence
  Synthetic
SAAETVKRLAEESSERIRKIVEDDKRVADDSSRKIKELIEEIKRRVKELLDRIKGLGSTEDLEKLLDELLKEVKRLLEELLDAHAKWSDDSRRLLEAVLRTHKELIDRLIKLLRDGGKPEEAVRRLEKVLRESLRRVKEVIKELIDLNKETLDRLKKIVEDLERVLREVLTELRRGSDSKEAVIRLIEELVKLLEDLAMSCAQESETLVELNKRVWDRLV

SEQ ID NO: 28088 - protein, 221 aa, Artificial Sequence
  Synthetic
SAAETVKRLAEESSERIRKIVEDDKRVADDSSRKIKELIEEIKRRVKELLDRIKGLGSTEDLEKLLDELLKEVKRLLEELLDAHAKWSDDSRRLLEAVLRTHKELIDRLIKLLRDGGKPEEAVRRLEKVLRESLRRVKEVIKELIDLNKETLDRLKKIVEDLERVLREVLTELRRGSDSKEAVIRLIEELVKLLEDVLAMSCAQESTLVELNKRVWDRLVR

SEQ ID NO: 28089 - protein, 223 aa, Artificial Sequence
  Synthetic
SAAETVKRLAEESSERIRKIVEDDKRVADDSSRKIKELIEEIKRRVKELLDRIKGLGSTEDLEKLLDELLKEVKRLLEELLDAHAKWSDDSRRLLEAVLRTHKELIDRLIKLLRDGGKPEEAVRRLEKVLRESLRRVKEVIKELIDLNKETLDRLKKIVEDLERVLREVLTELRRGSDSKEAVIRLIEELVKLLEDVLRLLMSCAQESVELNKRVWDRLVRIN

SEQ ID NO: 28090 - protein, 224 aa, Artificial Sequence; identical to SEQ ID NO: 28085
  Synthetic

SEQ ID NO: 28091 - protein, 225 aa, Artificial Sequence
  Synthetic
SAAETVKRLAEESSERIRKIVEDDKRVADDSSRKIKELIEEIKRRVKELLDRIKGLGSTEDLEKLLDELLKEVKRLLEELLDAHAKWSDDSRRLLEAVLRTHKELIDRLIKLLRDGGKPEEAVRRLEKVLRESLRRVKEVIKELIDLNKETLDRLKKIVEDLERVLREVLTELRRGSDSKEAVIRLIEELVKLLEDVLRRLLEMSCAQESLNKRVWDRLVRINEE

SEQ ID NO: 28092 - protein, 220 aa, Artificial Sequence
  Synthetic
SALETVKKLLEDSSEKIERIVEEDERVAKESSDRIRRLVEEDKRVADEILDLIEKIGDTDTLLKLVEEWSRTSKKLLDDVLKLHKDWSDDSRRLLEEILRVHEELIRRVKEILDREGKPEEVVRELEKVLKESLDTLEEIIRRLDEANAATVKRVADVIRELEDINRKVLEEIKRGSDDAEAVIKVIEKLIRANKRLWMSCAQESEDLVRVNKTVWKELL

SEQ ID NO: 28093 - protein, 223 aa, Artificial Sequence
  Synthetic
SALETVKKLLEDSSEKIERIVEEDERVAKESSDRIRRLVEEDKRVADEILDLIEKIGDTDTLLKLVEEWSRTSKKLLDDVLKLHKDWSDDSRRLLEEILRVHEELIRRVKEILDREGKPEEVVRELEKVLKESLDTLEEIIRRLDEANAATVKRVADVIRELEDINRKVLEEIKRGSDDAEAVIKVIEKLIRANKRVWDLLMSCAQESVRVNKTVWKELLRVN

SEQ ID NO: 28094 - protein, 224 aa, Artificial Sequence
  Synthetic
SALETVKKLLEDSSEKIERIVEEDERVAKESSDRIRRLVEEDKRVADEILDLIEKIGDTDTLLKLVEEWSRTSKKLLDDVLKLHKDWSDDSRRLLEEILRVHEELIRRVKEILDREGKPEEVVRELEKVLKESLDTLEEIIRRLDEANAATVKRVADVIRELEDINRKVLEEIKRGSDDAEAVIKVIEKLIRANKRVWDALLMSCAQESRVNKTVWKELLRVNE

SEQ ID NO: 28095 - protein, 220 aa, Artificial Sequence; identical to SEQ ID NO: 28092
  Synthetic

SEQ ID NO: 28096 - protein, 221 aa, Artificial Sequence
  Synthetic
SALETVKKLLEDSSEKIERIVEEDERVAKESSDRIRRLVEEDKRVADEILDLIEKIGDTDTLLKLVEEWSRTSKKLLDDVLKLHKDWSDDSRRLLEEILRVHEELIRRVKEILDREGKPEEVVRELEKVLKESLDTLEEIIRRLDEANAATVKRVADVIRELEDINRKVLEEIKRGSDDAEAVIKVIEKLIRANKRVLDMSCAQESDLVRVNKTVWKELLR

SEQ ID NO: 28097 - protein, 223 aa, Artificial Sequence; identical to SEQ ID NO: 28093
  Synthetic

SEQ ID NO: 28098 - protein, 224 aa, Artificial Sequence; identical to SEQ ID NO: 28094
  Synthetic

SEQ ID NO: 28099 - protein, 227 aa, Artificial Sequence
  Synthetic
DEIETVLKRLAELIKESLDLLRETLDELRKIIEESKKSLEDVLRRLKELIDRLRRLAKEGGSEELLRLLIEVIERLLKVVEDLLRESNRVVERLIRVNREALRLSNRVVADLLKVLKDAGPDSEELRKLAEDVLRENAELSRESVKIAEKMLEENRDLTRRLKELAKKVLEEIRDLVRGVRDADELLRRVEEILKRLLELIRRLIMSCAQESERLLETHEDLIRKHE

SEQ ID NO: 28100 - protein, 230 aa, Artificial Sequence
  Synthetic
DEIETVLKRLAELIKESLDLLRETLDELRKIIEESKKSLEDVLRRLKELIDRLRRLAKEGGSEELLRLLIEVIERLLKVVEDLLRESNRVVERLIRVNREALRLSNRVVADLLKVLKDAGPDSEELRKLAEDVLRENAELSRESVKIAEKMLEENRDLTRRLKELAKKVLEEIRDLVRGVRDADELLRRVEEILKRLLELIRRIIELHMSCAQESLETHEDLIRKHEEIL

SEQ ID NO: 28101 - protein, 234 aa, Artificial Sequence
  Synthetic
DEIETVLKRLAELIKESLDLLRETLDELRKIIEESKKSLEDVLRRLKELIDRLRRLAKEGGSEELLRLLIEVIERLLKVVEDLLRESNRVVERLIRVNREALRLSNRVVADLLKVLKDAGPDSEELRKLAEDVLRENAELSRESVKIAEKMLEENRDLTRRLKELAKKVLEEIRDLVRGVRDADELLRRVEEILKRLLELIRRIIEEHRKLNMSCAQESEDLIRKHEEILRRLL

SEQ ID NO: 28102 - protein, 237 aa, Artificial Sequence
  Synthetic
DEIETVLKRLAELIKESLDLLRETLDELRKIIEESKKSLEDVLRRLKELIDRLRRLAKEGGSEELLRLLIEVIERLLKVVEDLLRESNRVVERLIRVNREALRLSNRVVADLLKVLKDAGPDSEELRKLAEDVLRENAELSRESVKIAEKMLEENRDLTRRLKELAKKVLEEIRDLVRGVRDADELLRRVEEILKRLLELIRRIIEEHRKILELLMSCAQESIRKHEEILRRLLKAA

SEQ ID NO: 28103 - protein, 238 aa, Artificial Sequence
  Synthetic
DEIETVLKRLAELIKESLDLLRETLDELRKIIEESKKSLEDVLRRLKELIDRLRRLAKEGGSEELLRLLIEVIERLLKVVEDLLRESNRVVERLIRVNREALRLSNRVVADLLKVLKDAGPDSEELRKLAEDVLRENAELSRESVKIAEKMLEENRDLTRRLKELAKKVLEEIRDLVRGVRDADELLRRVEEILKRLLELIRRIIEEHRKILERLLMSCAQESRKHEEILRRLLKAAD

SEQ ID NO: 28104 - protein, 241 aa, Artificial Sequence
  Synthetic
DEIETVLKRLAELIKESLDLLRETLDELRKIIEESKKSLEDVLRRLKELIDRLRRLAKEGGSEELLRLLIEVIERLLKVVEDLLRESNRVVERLIRVNREALRLSNRVVADLLKVLKDAGPDSEELRKLAEDVLRENAELSRESVKIAEKMLEENRDLTRRLKELAKKVLEEIRDLVRGVRDADELLRRVEEILKRLLELIRRIIEEHRKILERLLELAMSCAQESEEILRRLLKAADEER

SEQ ID NO: 28105 - protein, 227 aa, Artificial Sequence; identical to SEQ ID NO: 28099
  Synthetic

SEQ ID NO: 28106 - protein, 230 aa, Artificial Sequence; identical to SEQ ID NO: 28100
  Synthetic

SEQ ID NO: 28107 - protein, 234 aa, Artificial Sequence; identical to SEQ ID NO: 28101
  Synthetic

SEQ ID NO: 28108 - protein, 237 aa, Artificial Sequence; identical to SEQ ID NO: 28102
  Synthetic

SEQ ID NO: 28109 - protein, 238 aa, Artificial Sequence; identical to SEQ ID NO: 28103
  Synthetic

SEQ ID NO: 28110 - protein, 218 aa, Artificial Sequence
  Synthetic
SKEEKLKDDVRAVLEDLDRVLKELEKLSEDNLRELKRVLDRITDLHRRILDELRKGIGSEELLRRVEKVLKDNLDLLRKLVEEHKESSERDLKRVEDLVREIKEVLRKLLELEDRGTDIRKIEEEIERLLRKIRKAVEESKDLNRRNSERIEEVARRSEELARRLLKEIRERGDSKAAEDILRVLEKLVKVSRELHMSCAQESEHHVRVSTRIARLLL

SEQ ID NO: 28111 - protein, 221 aa, Artificial Sequence
  Synthetic
SKEEKLKDDVRAVLEDLDRVLKELEKLSEDNLRELKRVLDRITDLHRRILDELRKGIGSEELLRRVEKVLKDNLDLLRKLVEEHKESSERDLKRVEDLVREIKEVLRKLLELEDRGTDIRKIEEEIERLLRKIRKAVEESKDLNRRNSERIEEVARRSEELARRLLKEIRERGDSKAAEDILRVLEKLVKVSREAIKLIMSCAQESVRVSTRIARLLLDVA

SEQ ID NO: 28112 - protein, 222 aa, Artificial Sequence
  Synthetic
SKEEKLKDDVRAVLEDLDRVLKELEKLSEDNLRELKRVLDRITDLHRRILDELRKGIGSEELLRRVEKVLKDNLDLLRKLVEEHKESSERDLKRVEDLVREIKEVLRKLLELEDRGTDIRKIEEEIERLLRKIRKAVEESKDLNRRNSERIEEVARRSEELARRLLKEIRERGDSKAAEDILRVLEKLVKVSREAIKLLLMSCAQESRVSTRIARLLLDVAR

SEQ ID NO: 28113 - protein, 225 aa, Artificial Sequence
  Synthetic
SKEEKLKDDVRAVLEDLDRVLKELEKLSEDNLRELKRVLDRITDLHRRILDELRKGIGSEELLRRVEKVLKDNLDLLRKLVEEHKESSERDLKRVEDLVREIKEVLRKLLELEDRGTDIRKIEEEIERLLRKIRKAVEESKDLNRRNSERIEEVARRSEELARRLLKEIRERGDSKAAEDILRVLEKLVKVSREAIKLILELAMSCAQESTRIARLLLDVARKLA

SEQ ID NO: 28114 - protein, 226 aa, Artificial Sequence
  Synthetic
SKEEKLKDDVRAVLEDLDRVLKELEKLSEDNLRELKRVLDRITDLHRRILDELRKGIGSEELLRRVEKVLKDNLDLLRKLVEEHKESSERDLKRVEDLVREIKEVLRKLLELEDRGTDIRKIEEEIERLLRKIRKAVEESKDLNRRNSERIEEVARRSEELARRLLKEIRERGDSKAAEDILRVLEKLVKVSREAIKLILELLKMSCAQESRIARLLLDVARKLAE

SEQ ID NO: 28115 - protein, 229 aa, Artificial Sequence
  Synthetic
SKEEKLKDDVRAVLEDLDRVLKELEKLSEDNLRELKRVLDRITDLHRRILDELRKGIGSEELLRRVEKVLKDNLDLLRKLVEEHKESSERDLKRVEDLVREIKEVLRKLLELEDRGTDIRKIEEEIERLLRKIRKAVEESKDLNRRNSERIEEVARRSEELARRLLKEIRERGDSKAAEDILRVLEKLVKVSREAIKLILELSEHLKMSCAQESRLLLDVARKLAEVIK

SEQ ID NO: 28116 - protein, 232 aa, Artificial Sequence
  Synthetic
SKEEKLKDDVRAVLEDLDRVLKELEKLSEDNLRELKRVLDRITDLHRRILDELRKGIGSEELLRRVEKVLKDNLDLLRKLVEEHKESSERDLKRVEDLVREIKEVLRKLLELEDRGTDIRKIEEEIERLLRKIRKAVEESKDLNRRNSERIEEVARRSEELARRLLKEIRERGDSKAAEDILRVLEKLVKVSREAIKLILELSEHHVRLAMSCAQESLDVARKLAEVIKEAE

SEQ ID NO: 28117 - protein, 233 aa, Artificial Sequence
  Synthetic
SKEEKLKDDVRAVLEDLDRVLKELEKLSEDNLRELKRVLDRITDLHRRILDELRKGIGSEELLRRVEKVLKDNLDLLRKLVEEHKESSERDLKRVEDLVREIKEVLRKLLELEDRGTDIRKIEEEIERLLRKIRKAVEESKDLNRRNSERIEEVARRSEELARRLLKEIRERGDSKAAEDILRVLEKLVKVSREAIKLILELSEHHVRVLTMSCAQESDVARKLAEVIKEAER

SEQ ID NO: 28118 - protein, 218 aa, Artificial Sequence
  Synthetic
SKEEKLKDDVRAVLEDLDRVLKELEKLSEDNLRELKRVLDRITDLHRRILDELRKGIGSEELLRRVEKVLKDNLDLLRKLVEEHKESSERDLKRVEDLVREIKEVLRKLLELEDRGTDIRKIEEEIERLLRKIRKAVEESKDLNRRNSERIEEVARRSEELARRLLKEIRERGDSKAAEDILRVLEKLVKVSRELCMSCAQESEHHVRVSTRIARLLL

SEQ ID NO: 28119 - protein, 221 aa, Artificial Sequence; identical to SEQ ID NO: 28111
  Synthetic

SEQ ID NO: 28120 - protein, 222 aa, Artificial Sequence; identical to SEQ ID NO: 28112
  Synthetic

SEQ ID NO: 28121 - protein, 225 aa, Artificial Sequence; identical to SEQ ID NO: 28113
  Synthetic

SEQ ID NO: 28122 - protein, 229 aa, Artificial Sequence
  Synthetic
SKEEKLKDDVRAVLEDLDRVLKELEKLSEDNLRELKRVLDRITDLHRRILDELRKGIGSEELLRRVEKVLKDNLDLLRKLVEEHKESSERDLKRVEDLVREIKEVLRKLLELEDRGTDIRKIEEEIERLLRKIRKAVEESKDLNRRNSERIEEVARRSEELARRLLKEIRERGDSKAAEDILRVLEKLVKVSREAIKLILELSEHLIMSCAQESRLLLDVARKLAEVIK

SEQ ID NO: 28123 - protein, 232 aa, Artificial Sequence
  Synthetic
SKEEKLKDDVRAVLEDLDRVLKELEKLSEDNLRELKRVLDRITDLHRRILDELRKGIGSEELLRRVEKVLKDNLDLLRKLVEEHKESSERDLKRVEDLVREIKEVLRKLLELEDRGTDIRKIEEEIERLLRKIRKAVEESKDLNRRNSERIEEVARRSEELARRLLKEIRERGDSKAAEDILRVLEKLVKVSREAIKLILELSEHHVRLSMSCAQESLDVARKLAEVIKEAE

SEQ ID NO: 28124 - protein, 233 aa, Artificial Sequence; identical to SEQ ID NO: 28117
  Synthetic

SEQ ID NO: 28125 - protein, 223 aa, Artificial Sequence
  Synthetic
SEIEDVIRRLRKILEDLERVSEKLLREIKKILDEARRLNEEVIKEIKRVLEDAVRVFRDGSGSKEELAKLVEELIRELAKLAKEVDEIHKRIVERLKALVEDAERIHRKIVETLEEIVRGVPSEELKRVVEAIVEVIKEHLKVLADVIRRIIKAIEENAETIKRVLEDIVRVLELVLRGEGSIEDLVREVERLIKRIEDLLMSCAQESRELLKRIKEASDKVR

SEQ ID NO: 28126 - protein, 227 aa, Artificial Sequence
  Synthetic
SEIEDVIRRLRKILEDLERVSEKLLREIKKILDEARRLNEEVIKEIKRVLEDAVRVFRDGSGSKEELAKLVEELIRELAKLAKEVDEIHKRIVERLKALVEDAERIHRKIVETLEEIVRGVPSEELKRVVEAIVEVIKEHLKVLADVIRRIIKAIEENAETIKRVLEDIVRVLELVLRGEGSIEDLVREVERLIKRIEDSLRELIMSCAQESKRIKEASDKVREDVD

SEQ ID NO: 28127 - protein, 230 aa, Artificial Sequence
  Synthetic
SEIEDVIRRLRKILEDLERVSEKLLREIKKILDEARRLNEEVIKEIKRVLEDAVRVFRDGSGSKEELAKLVEELIRELAKLAKEVDEIHKRIVERLKALVEDAERIHRKIVETLEEIVRGVPSEELKRVVEAIVEVIKEHLKVLADVIRRIIKAIEENAETIKRVLEDIVRVLELVLRGEGSIEDLVREVERLIKRIEDSLRELEKLVMSCAQESKEASDKVREDVDRLI

SEQ ID NO: 28128 - protein, 234 aa, Artificial Sequence
  Synthetic
SEIEDVIRRLRKILEDLERVSEKLLREIKKILDEARRLNEEVIKEIKRVLEDAVRVFRDGSGSKEELAKLVEELIRELAKLAKEVDEIHKRIVERLKALVEDAERIHRKIVETLEEIVRGVPSEELKRVVEAIVEVIKEHLKVLADVIRRIIKAIEENAETIKRVLEDIVRVLELVLRGEGSIEDLVREVERLIKRIEDSLRELEKTVRELMMSCAQESDKVREDVDRLIKELK

SEQ ID NO: 28129 - protein, 237 aa, Artificial Sequence
  Synthetic
SEIEDVIRRLRKILEDLERVSEKLLREIKKILDEARRLNEEVIKEIKRVLEDAVRVFRDGSGSKEELAKLVEELIRELAKLAKEVDEIHKRIVERLKALVEDAERIHRKIVETLEEIVRGVPSEELKRVVEAIVEVIKEHLKVLADVIRRIIKAIEENAETIKRVLEDIVRVLELVLRGEGSIEDLVREVERLIKRIEDSLRELEKTVRELLKLMMSCAQESREDVDRLIKELKEAA

SEQ ID NO: 28130 - protein, 238 aa, Artificial Sequence
  Synthetic
SEIEDVIRRLRKILEDLERVSEKLLREIKKILDEARRLNEEVIKEIKRVLEDAVRVFRDGSGSKEELAKLVEELIRELAKLAKEVDEIHKRIVERLKALVEDAERIHRKIVETLEEIVRGVPSEELKRVVEAIVEVIKEHLKVLADVIRRIIKAIEENAETIKRVLEDIVRVLELVLRGEGSIEDLVREVERLIKRIEDSLRELEKTVRELLKRLQMSCAQESEDVDRLIKELKEAAD

SEQ ID NO: 28131 - protein, 223 aa, Artificial Sequence
  Synthetic
SEIEDVIRRLRKILEDLERVSEKLLREIKKILDEARRLNEEVIKEIKRVLEDAVRVFRDGSGSKEELAKLVEELIRELAKLAKEVDEIHKRIVERLKALVEDAERIHRKIVETLEEIVRGVPSEELKRVVEAIVEVIKEHLKVLADVIRRIIKAIEENAETIKRVLEDIVRVLELVLRGEGSIEDLVREVERLIKRIEDLVMSCAQESRELLKRIKEASDKVR

SEQ ID NO: 28132 - protein, 230 aa, Artificial Sequence; identical to SEQ ID NO: 28127
  Synthetic

SEQ ID NO: 28133 - protein, 234 aa, Artificial Sequence
  Synthetic
SEIEDVIRRLRKILEDLERVSEKLLREIKKILDEARRLNEEVIKEIKRVLEDAVRVFRDGSGSKEELAKLVEELIRELAKLAKEVDEIHKRIVERLKALVEDAERIHRKIVETLEEIVRGVPSEELKRVVEAIVEVIKEHLKVLADVIRRIIKAIEENAETIKRVLEDIVRVLELVLRGEGSIEDLVREVERLIKRIEDSLRELEKTVRELLMSCAQESDKVREDVDRLIKELK

SEQ ID NO: 28134 - protein, 237 aa, Artificial Sequence
  Synthetic
SEIEDVIRRLRKILEDLERVSEKLLREIKKILDEARRLNEEVIKEIKRVLEDAVRVFRDGSGSKEELAKLVEELIRELAKLAKEVDEIHKRIVERLKALVEDAERIHRKIVETLEEIVRGVPSEELKRVVEAIVEVIKEHLKVLADVIRRIIKAIEENAETIKRVLEDIVRVLELVLRGEGSIEDLVREVERLIKRIEDSLRELEKTVRELLKLAMSCAQESREDVDRLIKELKEAA

SEQ ID NO: 28135 - protein, 238 aa, Artificial Sequence
  Synthetic
SEIEDVIRRLRKILEDLERVSEKLLREIKKILDEARRLNEEVIKEIKRVLEDAVRVFRDGSGSKEELAKLVEELIRELAKLAKEVDEIHKRIVERLKALVEDAERIHRKIVETLEEIVRGVPSEELKRVVEAIVEVIKEHLKVLADVIRRIIKAIEENAETIKRVLEDIVRVLELVLRGEGSIEDLVREVERLIKRIEDSLRELEKTVRELLKRLAMSCAQESEDVDRLIKELKEAAD

SEQ ID NO: 28136 - protein, 231 aa, Artificial Sequence
  Synthetic
SREEIVATLEDLARKILEVVKKLAKEIEDAWREIERAVREILKRLEELWREIEDVVRKKVDSRVAEILETVVKRVVDITRRLIEEAERVVRELVDITRKLITILEEVVRRLVEIVREASKIDDRRELEDMLRKIREVVREVIERLKKLDEDVRRVVEEVIRRLEELNKRLEDVIREVKKRLKELGLSEEAVKELVELLEEILERNTRLVMSCAQESRTVIRIHEKIVEDLI

SEQ ID NO: 28137 - protein, 234 aa, Artificial Sequence
  Synthetic
SREEIVATLEDLARKILEVVKKLAKEIEDAWREIERAVREILKRLEELWREIEDVVRKKVDSRVAEILETVVKRVVDITRRLIEEAERVVRELVDITRKLITILEEVVRRLVEIVREASKIDDRRELEDMLRKIREVVREVIERLKKLDEDVRRVVEEVIRRLEELNKRLEDVIREVKKRLKELGLSEEAVKELVELLEEILERNTRVIKLIMSCAQESIRIHEKIVEDLIKLL

SEQ ID NO: 28138 - protein, 238 aa, Artificial Sequence
  Synthetic
SREEIVATLEDLARKILEVVKKLAKEIEDAWREIERAVREILKRLEELWREIEDVVRKKVDSRVAEILETVVKRVVDITRRLIEEAERVVRELVDITRKLITILEEVVRRLVEIVREASKIDDRRELEDMLRKIREVVREVIERLKKLDEDVRRVVEEVIRRLEELNKRLEDVIREVKKRLKELGLSEEAVKELVELLEEILERNTRVIKEIIDLLMSCAQESEKIVEDLIKLLEELL

SEQ ID NO: 28139 - protein, 242 aa, Artificial Sequence
  Synthetic
SREEIVATLEDLARKILEVVKKLAKEIEDAWREIERAVREILKRLEELWREIEDVVRKKVDSRVAEILETVVKRVVDITRRLIEEAERVVRELVDITRKLITILEEVVRRLVEIVREASKIDDRRELEDMLRKIREVVREVIERLKKLDEDVRRVVEEVIRRLEELNKRLEDVIREVKKRLKELGLSEEAVKELVELLEEILERNTRVIKEIIDLLRTLTMSCAQESEDLIKLLEELLRRLE

SEQ ID NO: 28140 - protein, 246 aa, Artificial Sequence
  Synthetic
SREEIVATLEDLARKILEVVKKLAKEIEDAWREIERAVREILKRLEELWREIEDVVRKKVDSRVAEILETVVKRVVDITRRLIEEAERVVRELVDITRKLITILEEVVRRLVEIVREASKIDDRRELEDMLRKIREVVREVIERLKKLDEDVRRVVEEVIRRLEELNKRLEDVIREVKKRLKELGLSEEAVKELVELLEEILERNTRVIKEIIDLLRTVIRILEMSCAQESKLLEELLRRLEEATR

SEQ ID NO: 28141 - protein, 231 aa, Artificial Sequence
  Synthetic
SREEIVATLEDLARKILEVVKKLAKEIEDAWREIERAVREILKRLEELWREIEDVVRKKVDSRVAEILETVVKRVVDITRRLIEEAERVVRELVDITRKLITILEEVVRRLVEIVREASKIDDRRELEDMLRKIREVVREVIERLKKLDEDVRRVVEEVIRRLEELNKRLEDVIREVKKRLKELGLSEEAVKELVELLEEILERNTRLNMSCAQESRTVIRIHEKIVEDLI

SEQ ID NO: 28142 - protein, 232 aa, Artificial Sequence
  Synthetic
SREEIVATLEDLARKILEVVKKLAKEIEDAWREIERAVREILKRLEELWREIEDVVRKKVDSRVAEILETVVKRVVDITRRLIEEAERVVRELVDITRKLITILEEVVRRLVEIVREASKIDDRRELEDMLRKIREVVREVIERLKKLDEDVRRVVEEVIRRLEELNKRLEDVIREVKKRLKELGLSEEAVKELVELLEEILERNTRVLKMSCAQESTVIRIHEKIVEDLIK

SEQ ID NO: 28143 - protein, 234 aa, Artificial Sequence; identical to SEQ ID NO: 28137
  Synthetic

SEQ ID NO: 28144 - protein, 238 aa, Artificial Sequence; identical to SEQ ID NO: 28138
  Synthetic

SEQ ID NO: 28145 - protein, 246 aa, Artificial Sequence
  Synthetic
SREEIVATLEDLARKILEVVKKLAKEIEDAWREIERAVREILKRLEELWREIEDVVRKKVDSRVAEILETVVKRVVDITRRLIEEAERVVRELVDITRKLITILEEVVRRLVEIVREASKIDDRRELEDMLRKIREVVREVIERLKKLDEDVRRVVEEVIRRLEELNKRLEDVIREVKKRLKELGLSEEAVKELVELLEEILERNTRVIKEIIDLLRTVIRILHMSCAQESKLLEELLRRLEEATR

SEQ ID NO: 28146 - protein, 225 aa, Artificial Sequence
  Synthetic
KEKEDALKKLEDLARKSREDLERVLRKHKKILDKIEELLKRVLDEHKKIVDDILRKTGTESEILKELARLLREHHEALRRLIEELRRLLEEHHKILEDLAREHKRLLDELIKVVADGVDKDELERIIKELRERDKKLVDDLRKVSEDLLDAVRKLVEDLERISRELLRRVEELAKGIDEELAREVERVIKELLDKSKEILELIMSCAQESLKVSEEILKLSEDAS

SEQ ID NO: 28147 - protein, 226 aa, Artificial Sequence
  Synthetic
KEKEDALKKLEDLARKSREDLERVLRKHKKILDKIEELLKRVLDEHKKIVDDILRKTGTESEILKELARLLREHHEALRRLIEELRRLLEEHHKILEDLAREHKRLLDELIKVVADGVDKDELERIIKELRERDKKLVDDLRKVSEDLLDAVRKLVEDLERISRELLRRVEELAKGIDEELAREVERVIKELLDKSKEILERLLMSCAQESKVSEEILKLSEDASE

SEQ ID NO: 28148 - protein, 230 aa, Artificial Sequence
  Synthetic
KEKEDALKKLEDLARKSREDLERVLRKHKKILDKIEELLKRVLDEHKKIVDDILRKTGTESEILKELARLLREHHEALRRLIEELRRLLEEHHKILEDLAREHKRLLDELIKVVADGVDKDELERIIKELRERDKKLVDDLRKVSEDLLDAVRKLVEDLERISRELLRRVEELAKGIDEELAREVERVIKELLDKSKEILERIERALKMSCAQESEILKLSEDASEELLK

SEQ ID NO: 28149 - protein, 232 aa, Artificial Sequence
  Synthetic
KEKEDALKKLEDLARKSREDLERVLRKHKKILDKIEELLKRVLDEHKKIVDDILRKTGTESEILKELARLLREHHEALRRLIEELRRLLEEHHKILEDLAREHKRLLDELIKVVADGVDKDELERIIKELRERDKKLVDDLRKVSEDLLDAVRKLVEDLERISRELLRRVEELAKGIDEELAREVERVIKELLDKSKEILERIERAIDLLMSCAQESLKLSEDASEELLKIL

SEQ ID NO: 28150 - protein, 233 aa, Artificial Sequence
  Synthetic
KEKEDALKKLEDLARKSREDLERVLRKHKKILDKIEELLKRVLDEHKKIVDDILRKTGTESEILKELARLLREHHEALRRLIEELRRLLEEHHKILEDLAREHKRLLDELIKVVADGVDKDELERIIKELRERDKKLVDDLRKVSEDLLDAVRKLVEDLERISRELLRRVEELAKGIDEELAREVERVIKELLDKSKEILERIERAIDELRMSCAQESKLSEDASEELLKILR

SEQ ID NO: 28151 - protein, 237 aa, Artificial Sequence
  Synthetic
KEKEDALKKLEDLARKSREDLERVLRKHKKILDKIEELLKRVLDEHKKIVDDILRKTGTESEILKELARLLREHHEALRRLIEELRRLLEEHHKILEDLAREHKRLLDELIKVVADGVDKDELERIIKELRERDKKLVDDLRKVSEDLLDAVRKLVEDLERISRELLRRVEELAKGIDEELAREVERVIKELLDKSKEILERIERAIDELLKVLEMSCAQESDASEELLKILREFAK

SEQ ID NO: 28152 - protein, 226 aa, Artificial Sequence; identical to SEQ ID NO: 28147
  Synthetic

SEQ ID NO: 28153 - protein, 230 aa, Artificial Sequence; identical to SEQ ID NO: 28148
  Synthetic

SEQ ID NO: 28154 - protein, 232 aa, Artificial Sequence; identical to SEQ ID NO: 28149
  Synthetic

SEQ ID NO: 28155 - protein, 233 aa, Artificial Sequence; identical to SEQ ID NO: 28150
  Synthetic

SEQ ID NO: 28156 - protein, 237 aa, Artificial Sequence; identical to SEQ ID NO: 28151
  Synthetic

SEQ ID NO: 28157 - protein, 214 aa, Artificial Sequence
  Synthetic
SKEERLREVAEKHKKDLEDIVKRVDEAAKETARRLEEILKRLEEVLKKILDDLEKGPDDEKLKKVKKILKDIMDRLAELIKKILKLLKENLEKIKELLRRNLEISEELLKLAKGLSDRDVLETVRRVLEKLDEEWDRVLEDSRRIIETILRELDTLLREVEKLIKEIKDEISGSKEVLDILERAVEVVRRLIMSCAQESERHVDATREVIERVK

SEQ ID NO: 28158 - protein, 215 aa, Artificial Sequence
  Synthetic
SKEERLREVAEKHKKDLEDIVKRVDEAAKETARRLEEILKRLEEVLKKILDDLEKGPDDEKLKKVKKILKDIMDRLAELIKKILKLLKENLEKIKELLRRNLEISEELLKLAKGLSDRDVLETVRRVLEKLDEEWDRVLEDSRRIIETILRELDTLLREVEKLIKEIKDEISGSKEVLDILERAVEVVRRVLKMSCAQESRHVDATREVIERVKR

SEQ ID NO: 28159 - protein, 217 aa, Artificial Sequence
  Synthetic
SKEERLREVAEKHKKDLEDIVKRVDEAAKETARRLEEILKRLEEVLKKILDDLEKGPDDEKLKKVKKILKDIMDRLAELIKKILKLLKENLEKIKELLRRNLEISEELLKLAKGLSDRDVLETVRRVLEKLDEEWDRVLEDSRRIIETILRELDTLLREVEKLIKEIKDEISGSKEVLDILERAVEVVRRVIKLLMSCAQESVDATREVIERVKRVN

SEQ ID NO: 28160 - protein, 218 aa, Artificial Sequence
  Synthetic
SKEERLREVAEKHKKDLEDIVKRVDEAAKETARRLEEILKRLEEVLKKILDDLEKGPDDEKLKKVKKILKDIMDRLAELIKKILKLLKENLEKIKELLRRNLEISEELLKLAKGLSDRDVLETVRRVLEKLDEEWDRVLEDSRRIIETILRELDTLLREVEKLIKEIKDEISGSKEVLDILERAVEVVRRVIKALAMSCAQESDATREVIERVKRVNK

SEQ ID NO: 28161 - protein, 221 aa, Artificial Sequence
  Synthetic
SKEERLREVAEKHKKDLEDIVKRVDEAAKETARRLEEILKRLEEVLKKILDDLEKGPDDEKLKKVKKILKDIMDRLAELIKKILKLLKENLEKIKELLRRNLEISEELLKLAKGLSDRDVLETVRRVLEKLDEEWDRVLEDSRRIIETILRELDTLLREVEKLIKEIKDEISGSKEVLDILERAVEVVRRVIKALKELGMSCAQESREVIERVKRVNKRLL

SEQ ID NO: 28162 - protein, 222 aa, Artificial Sequence
  Synthetic
SKEERLREVAEKHKKDLEDIVKRVDEAAKETARRLEEILKRLEEVLKKILDDLEKGPDDEKLKKVKKILKDIMDRLAELIKKILKLLKENLEKIKELLRRNLEISEELLKLAKGLSDRDVLETVRRVLEKLDEEWDRVLEDSRRIIETILRELDTLLREVEKLIKEIKDEISGSKEVLDILERAVEVVRRVIKALKEVLEMSCAQESEVIERVKRVNKRLLE

SEQ ID NO: 28163 - protein, 225 aa, Artificial Sequence
  Synthetic
SKEERLREVAEKHKKDLEDIVKRVDEAAKETARRLEEILKRLEEVLKKILDDLEKGPDDEKLKKVKKILKDIMDRLAELIKKILKLLKENLEKIKELLRRNLEISEELLKLAKGLSDRDVLETVRRVLEKLDEEWDRVLEDSRRIIETILRELDTLLREVEKLIKEIKDEISGSKEVLDILERAVEVVRRVIKALKEVLERLGMSCAQESERVKRVNKRLLEAVR

SEQ ID NO: 28164 - protein, 228 aa, Artificial Sequence
  Synthetic
SKEERLREVAEKHKKDLEDIVKRVDEAAKETARRLEEILKRLEEVLKKILDDLEKGPDDEKLKKVKKILKDIMDRLAELIKKILKLLKENLEKIKELLRRNLEISEELLKLAKGLSDRDVLETVRRVLEKLDEEWDRVLEDSRRIIETILRELDTLLREVEKLIKEIKDEISGSKEVLDILERAVEVVRRVIKALKEVLERHVDLTMSCAQESKRVNKRLLEAVREVV

SEQ ID NO: 28165 - protein, 229 aa, Artificial Sequence
  Synthetic
SKEERLREVAEKHKKDLEDIVKRVDEAAKETARRLEEILKRLEEVLKKILDDLEKGPDDEKLKKVKKILKDIMDRLAELIKKILKLLKENLEKIKELLRRNLEISEELLKLAKGLSDRDVLETVRRVLEKLDEEWDRVLEDSRRIIETILRELDTLLREVEKLIKEIKDEISGSKEVLDILERAVEVVRRVIKALKEVLERHVDALRMSCAQESRVNKRLLEAVREVVT

SEQ ID NO: 28166 - protein, 215 aa, Artificial Sequence; identical to SEQ ID NO: 28158
  Synthetic

SEQ ID NO: 28167 - protein, 217 aa, Artificial Sequence; identical to SEQ ID NO: 28159
  Synthetic

SEQ ID NO: 28168 - protein, 218 aa, Artificial Sequence
  Synthetic
SKEERLREVAEKHKKDLEDIVKRVDEAAKETARRLEEILKRLEEVLKKILDDLEKGPDDEKLKKVKKILKDIMDRLAELIKKILKLLKENLEKIKELLRRNLEISEELLKLAKGLSDRDVLETVRRVLEKLDEEWDRVLEDSRRIIETILRELDTLLREVEKLIKEIKDEISGSKEVLDILERAVEVVRRVIKALKMSCAQESDATREVIERVKRVNK

SEQ ID NO: 28169 - protein, 221 aa, Artificial Sequence; identical to SEQ ID NO: 28161
  Synthetic

SEQ ID NO: 28170 - protein, 222 aa, Artificial Sequence; identical to SEQ ID NO: 28162
  Synthetic

SEQ ID NO: 28171 - protein, 225 aa, Artificial Sequence
  Synthetic
SKEERLREVAEKHKKDLEDIVKRVDEAAKETARRLEEILKRLEEVLKKILDDLEKGPDDEKLKKVKKILKDIMDRLAELIKKILKLLKENLEKIKELLRRNLEISEELLKLAKGLSDRDVLETVRRVLEKLDEEWDRVLEDSRRIIETILRELDTLLREVEKLIKEIKDEISGSKEVLDILERAVEVVRRVIKALKEVLERLYMSCAQESERVKRVNKRLLEAVR

SEQ ID NO: 28172 - protein, 228 aa, Artificial Sequence; identical to SEQ ID NO: 28164
  Synthetic

SEQ ID NO: 28173 - protein, 229 aa, Artificial Sequence; identical to SEQ ID NO: 28165
  Synthetic

SEQ ID NO: 28174 - protein, 226 aa, Artificial Sequence
  Synthetic
SEKELLKEILDRIRELLEDDNRLLKRIVDEIRKLLEEWLRVHKEILERIKELLDRIGAPEDVIRELTRALKETEEDVDRVIRTLEKLLKEVLDAHEEVVRKLDRLLKEVERLVEGGDAEEVVRDLLRVVKEILDESKAVIDELARVVDEILKLLEEVDRKLAKVVKEILEDVLRGSGDDEDAVRKIAKIIEELKRLLEDLARLTMSCAQESKRLLKEWRDRNKEVA

SEQ ID NO: 28175 - protein, 230 aa, Artificial Sequence
  Synthetic
SEKELLKEILDRIRELLEDDNRLLKRIVDEIRKLLEEWLRVHKEILERIKELLDRIGAPEDVIRELTRALKETEEDVDRVIRTLEKLLKEVLDAHEEVVRKLDRLLKEVERLVEGGDAEEVVRDLLRVVKEILDESKAVIDELARVVDEILKLLEEVDRKLAKVVKEILEDVLRGSGDDEDAVRKIAKIIEELKRLLEDLARDTRRLIMSCAQESKEWRDRNKEVADTLK

SEQ ID NO: 28176 - protein, 233 aa, Artificial Sequence
  Synthetic
SEKELLKEILDRIRELLEDDNRLLKRIVDEIRKLLEEWLRVHKEILERIKELLDRIGAPEDVIRELTRALKETEEDVDRVIRTLEKLLKEVLDAHEEVVRKLDRLLKEVERLVEGGDAEEVVRDLLRVVKEILDESKAVIDELARVVDEILKLLEEVDRKLAKVVKEILEDVLRGSGDDEDAVRKIAKIIEELKRLLEDLARDTRRVIELAMSCAQESRDRNKEVADTLKKLL

SEQ ID NO: 28177 - protein, 237 aa, Artificial Sequence
  Synthetic
SEKELLKEILDRIRELLEDDNRLLKRIVDEIRKLLEEWLRVHKEILERIKELLDRIGAPEDVIRELTRALKETEEDVDRVIRTLEKLLKEVLDAHEEVVRKLDRLLKEVERLVEGGDAEEVVRDLLRVVKEILDESKAVIDELARVVDEILKLLEEVDRKLAKVVKEILEDVLRGSGDDEDAVRKIAKIIEELKRLLEDLARDTRRVIEEAKRLLMSCAQESKEVADTLKKLLEDLI

SEQ ID NO: 28178 - protein, 241 aa, Artificial Sequence
  Synthetic
SEKELLKEILDRIRELLEDDNRLLKRIVDEIRKLLEEWLRVHKEILERIKELLDRIGAPEDVIRELTRALKETEEDVDRVIRTLEKLLKEVLDAHEEVVRKLDRLLKEVERLVEGGDAEEVVRDLLRVVKEILDESKAVIDELARVVDEILKLLEEVDRKLAKVVKEILEDVLRGSGDDEDAVRKIAKIIEELKRLLEDLARDTRRVIEEAKRLLKELRMSCAQESDTLKKLLEDLIRKIR

SEQ ID NO: 28179 - protein, 226 aa, Artificial Sequence; identical to SEQ ID NO: 28174
  Synthetic

SEQ ID NO: 28180 - protein, 230 aa, Artificial Sequence; identical to SEQ ID NO: 28175
  Synthetic

SEQ ID NO: 28181 - protein, 233 aa, Artificial Sequence; identical to SEQ ID NO: 28176
  Synthetic

SEQ ID NO: 28182 - protein, 241 aa, Artificial Sequence; identical to SEQ ID NO: 28178
  Synthetic

SEQ ID NO: 28183 - protein, 234 aa, Artificial Sequence
  Synthetic
SEDELLEKIVRKLAEAVKRIEEELRKSKREIERLVKEIKEKLEDSLARVKETLDRIRETRKGPSDEEVLERLVRTLEELLARHLKLIEDIARELKKLLKEHLDRIETIVRDLKRLLKEILDELERTGLPREALEAVRELVKTVARLLDEVLKNNKKLLDDLKKELDDVLANNKRIVDELARLLERVRRGKEDLEELLRLLKEVIERSIESLLMSCAQESRVLEYSVASLEELLR

SEQ ID NO: 28184 - protein, 238 aa, Artificial Sequence
  Synthetic
SEDELLEKIVRKLAEAVKRIEEELRKSKREIERLVKEIKEKLEDSLARVKETLDRIRETRKGPSDEEVLERLVRTLEELLARHLKLIEDIARELKKLLKEHLDRIETIVRDLKRLLKEILDELERTGLPREALEAVRELVKTVARLLDEVLKNNKKLLDDLKKELDDVLANNKRIVDELARLLERVRRGKEDLEELLRLLKEVIERSIESLERLLKMSCAQESYSVASLEELLRRLLE

SEQ ID NO: 28185 - protein, 241 aa, Artificial Sequence
  Synthetic
SEDELLEKIVRKLAEAVKRIEEELRKSKREIERLVKEIKEKLEDSLARVKETLDRIRETRKGPSDEEVLERLVRTLEELLARHLKLIEDIARELKKLLKEHLDRIETIVRDLKRLLKEILDELERTGLPREALEAVRELVKTVARLLDEVLKNNKKLLDDLKKELDDVLANNKRIVDELARLLERVRRGKEDLEELLRLLKEVIERSIESLERLLELLLMSCAQESASLEELLRRLLEVIK

SEQ ID NO: 28186 - protein, 244 aa, Artificial Sequence
  Synthetic
SEDELLEKIVRKLAEAVKRIEEELRKSKREIERLVKEIKEKLEDSLARVKETLDRIRETRKGPSDEEVLERLVRTLEELLARHLKLIEDIARELKKLLKEHLDRIETIVRDLKRLLKEILDELERTGLPREALEAVRELVKTVARLLDEVLKNNKKLLDDLKKELDDVLANNKRIVDELARLLERVRRGKEDLEELLRLLKEVIERSIESLERLLELILRLIMSCAQESEELLRRLLEVIKRIV

SEQ ID NO: 28187 - protein, 247 aa, Artificial Sequence
  Synthetic
SEDELLEKIVRKLAEAVKRIEEELRKSKREIERLVKEIKEKLEDSLARVKETLDRIRETRKGPSDEEVLERLVRTLEELLARHLKLIEDIARELKKLLKEHLDRIETIVRDLKRLLKEILDELERTGLPREALEAVRELVKTVARLLDEVLKNNKKLLDDLKKELDDVLANNKRIVDELARLLERVRRGKEDLEELLRLLKEVIERSIESLERLLELILRVLELAMSCAQESLRRLLEVIKRIVDTT

SEQ ID NO: 28188 - protein, 244 aa, Artificial Sequence
  Synthetic
SEDELLEKIVRKLAEAVKRIEEELRKSKREIERLVKEIKEKLEDSLARVKETLDRIRETRKGPSDEEVLERLVRTLEELLARHLKLIEDIARELKKLLKEHLDRIETIVRDLKRLLKEILDELERTGLPREALEAVRELVKTVARLLDEVLKNNKKLLDDLKKELDDVLANNKRIVDELARLLERVRRGKEDLEELLRLLKEVIERSIESLERLLELILRLMMSCAQESEELLRRLLEVIKRIV

SEQ ID NO: 28189 - protein, 247 aa, Artificial Sequence; identical to SEQ ID NO: 28187
  Synthetic

SEQ ID NO: 28190 - protein, 222 aa, Artificial Sequence
  Synthetic
DEDEIAEELKRLLREVEEASKEIVRRMRELAREANKASEDILRTLEKLLEELRRRVEESGGSSKAVLDKIREVLETLKELLDRHHETVRDLVRRLKELLDRHNETVAKLVEDIKALLDKSGGREEIKKRLEDALREHNRIIAEIKKLLDKVLKDHKDILDDIKKKLDDVLREVTEILKRGRIDEVVRRIERVIREVIKLLMSCAQESHDVVEEIIRLLEEVT

SEQ ID NO: 28191 - protein, 227 aa, Artificial Sequence
  Synthetic
DEDEIAEELKRLLREVEEASKEIVRRMRELAREANKASEDILRTLEKLLEELRRRVEESGGSSKAVLDKIREVLETLKELLDRHHETVRDLVRRLKELLDRHNETVAKLVEDIKALLDKSGGREEIKKRLEDALREHNRIIAEIKKLLDKVLKDHKDILDDIKKKLDDVLREVTEILKRGRIDEVVRRIERVIREVIKILARALEMSCAQESEIIRLLEEVTDELRR

SEQ ID NO: 28192 - protein, 230 aa, Artificial Sequence
  Synthetic
DEDEIAEELKRLLREVEEASKEIVRRMRELAREANKASEDILRTLEKLLEELRRRVEESGGSSKAVLDKIREVLETLKELLDRHHETVRDLVRRLKELLDRHNETVAKLVEDIKALLDKSGGREEIKKRLEDALREHNRIIAEIKKLLDKVLKDHKDILDDIKKKLDDVLREVTEILKRGRIDEVVRRIERVIREVIKILARANKRLHMSCAQESRLLEEVTDELRRVVE

SEQ ID NO: 28193 - protein, 233 aa, Artificial Sequence
  Synthetic
DEDEIAEELKRLLREVEEASKEIVRRMRELAREANKASEDILRTLEKLLEELRRRVEESGGSSKAVLDKIREVLETLKELLDRHHETVRDLVRRLKELLDRHNETVAKLVEDIKALLDKSGGREEIKKRLEDALREHNRIIAEIKKLLDKVLKDHKDILDDIKKKLDDVLREVTEILKRGRIDEVVRRIERVIREVIKILARANKRLHDLVMSCAQESEEVTDELRRVVEEVI

SEQ ID NO: 28194 - protein, 234 aa, Artificial Sequence
  Synthetic
DEDEIAEELKRLLREVEEASKEIVRRMRELAREANKASEDILRTLEKLLEELRRRVEESGGSSKAVLDKIREVLETLKELLDRHHETVRDLVRRLKELLDRHNETVAKLVEDIKALLDKSGGREEIKKRLEDALREHNRIIAEIKKLLDKVLKDHKDILDDIKKKLDDVLREVTEILKRGRIDEVVRRIERVIREVIKILARANKRLHDVLEMSCAQESEVTDELRRVVEEVIR

SEQ ID NO: 28195 - protein, 222 aa, Artificial Sequence; identical to SEQ ID NO: 28190
  Synthetic

SEQ ID NO: 28196 - protein, 233 aa, Artificial Sequence; identical to SEQ ID NO: 28193
  Synthetic

SEQ ID NO: 28197 - protein, 234 aa, Artificial Sequence; identical to SEQ ID NO: 28194
  Synthetic

SEQ ID NO: 28198 - protein, 234 aa, Artificial Sequence
  Synthetic
DAEEKAKKIEDVARRYAEEVKRVLDDLERLLRESEEEVERIVRKLEKLARDLEERVREGTKSEAVERLVRELLKAIKELIDVLRDVVRLSAEVIKELLDVLRELVELNLRAIKEIIEVLSKGKSEEVKKALDEILEKIEKVNTDVNRRLAEIIRKLREIHEEVLRELDKILRDIESVVRDVERGIDDKEVIDALKELLKVLEDLLREIKELTMSCAQESDELLKLLHELSRRVI

SEQ ID NO: 28199 - protein, 241 aa, Artificial Sequence
  Synthetic
DAEEKAKKIEDVARRYAEEVKRVLDDLERLLRESEEEVERIVRKLEKLARDLEERVREGTKSEAVERLVRELLKAIKELIDVLRDVVRLSAEVIKELLDVLRELVELNLRAIKEIIEVLSKGKSEEVKKALDEILEKIEKVNTDVNRRLAEIIRKLREIHEEVLRELDKILRDIESVVRDVERGIDDKEVIDALKELLKVLEDLLREIKEALTRNLELAMSCAQESHELSRRVIEELRKLL

SEQ ID NO: 28200 - protein, 234 aa, Artificial Sequence
  Synthetic
DAEEKAKKIEDVARRYAEEVKRVLDDLERLLRESEEEVERIVRKLEKLARDLEERVREGTKSEAVERLVRELLKAIKELIDVLRDVVRLSAEVIKELLDVLRELVELNLRAIKEIIEVLSKGKSEEVKKALDEILEKIEKVNTDVNRRLAEIIRKLREIHEEVLRELDKILRDIESVVRDVERGIDDKEVIDALKELLKVLEDLLREIKELMMSCAQESDELLKLLHELSRRVI

SEQ ID NO: 28201 - protein, 237 aa, Artificial Sequence
  Synthetic
DAEEKAKKIEDVARRYAEEVKRVLDDLERLLRESEEEVERIVRKLEKLARDLEERVREGTKSEAVERLVRELLKAIKELIDVLRDVVRLSAEVIKELLDVLRELVELNLRAIKEIIEVLSKGKSEEVKKALDEILEKIEKVNTDVNRRLAEIIRKLREIHEEVLRELDKILRDIESVVRDVERGIDDKEVIDALKELLKVLEDLLREIKEALTLFMSCAQESLKLLHELSRRVIEEL

SEQ ID NO: 28202 - protein, 238 aa, Artificial Sequence
  Synthetic
DAEEKAKKIEDVARRYAEEVKRVLDDLERLLRESEEEVERIVRKLEKLARDLEERVREGTKSEAVERLVRELLKAIKELIDVLRDVVRLSAEVIKELLDVLRELVELNLRAIKEIIEVLSKGKSEEVKKALDEILEKIEKVNTDVNRRLAEIIRKLREIHEEVLRELDKILRDIESVVRDVERGIDDKEVIDALKELLKVLEDLLREIKEALTRLGMSCAQESKLLHELSRRVIEELR

SEQ ID NO: 28203 - protein, 242 aa, Artificial Sequence
  Synthetic
DAEEKAKKIEDVARRYAEEVKRVLDDLERLLRESEEEVERIVRKLEKLARDLEERVREGTKSEAVERLVRELLKAIKELIDVLRDVVRLSAEVIKELLDVLRELVELNLRAIKEIIEVLSKGKSEEVKKALDEILEKIEKVNTDVNRRLAEIIRKLREIHEEVLRELDKILRDIESVVRDVERGIDDKEVIDALKELLKVLEDLLREIKEALTRNLEKLDMSCAQESELSRRVIEELRKLLE

SEQ ID NO: 28204 - protein, 229 aa, Artificial Sequence
  Synthetic
DEEELLREIKTILDESLKALEELIRKIMRILDKSLKDLEEIVREIKKTIDELLEKVRRSGLPEEVLKKVASVAEKVKEDIDRLLEDVERSHREVKKKLDELLKEVKRSHEEVKKELDSLRGDSDRDTVAREILRVLKKNLDVLAEVVEKIVKVLEDNLKSLKAVLETLVDLLRKLIKVLREGGLSEEALDDLRRLVKELADKLRKLLMSCAQESKELKDEAKKLLDDYA

SEQ ID NO: 28205 - protein, 240 aa, Artificial Sequence
  Synthetic
DEEELLREIKTILDESLKALEELIRKIMRILDKSLKDLEEIVREIKKTIDELLEKVRRSGLPEEVLKKVASVAEKVKEDIDRLLEDVERSHREVKKKLDELLKEVKRSHEEVKKELDSLRGDSDRDTVAREILRVLKKNLDVLAEVVEKIVKVLEDNLKSLKAVLETLVDLLRKLIKVLREGGLSEEALDDLRRLVKELADKLRKLLKDYKDLLKELKMSCAQESDDYARLIEELEKKAR

SEQ ID NO: 28206 - protein, 226 aa, Artificial Sequence
  Synthetic
DEEELLREIKTILDESLKALEELIRKIMRILDKSLKDLEEIVREIKKTIDELLEKVRRSGLPEEVLKKVASVAEKVKEDIDRLLEDVERSHREVKKKLDELLKEVKRSHEEVKKELDSLRGDSDRDTVAREILRVLKKNLDVLAEVVEKIVKVLEDNLKSLKAVLETLVDLLRKLIKVLREGGLSEEALDDLRRLVKELADKLKMSCAQESDLLKELKDEAKKLLD

SEQ ID NO: 28207 - protein, 240 aa, Artificial Sequence; identical to SEQ ID NO: 28205
  Synthetic

SEQ ID NO: 28208 - protein, 222 aa, Artificial Sequence
  Synthetic
SREELLDRILEAIAKILEDLKRLIDENLARLEEVVRELERIIDRNLKLIREILDELKKGSGSEEILEKIKKVDKELEDLIRRLLKKLEDLIRETERRLREILKRIRDLLKEVKDRDKDLERLLEVLEEVLRVIAELAKELLDSLRKVLKVVEEVLRLLNEVNKEVLDVIRELAKDGGSDEIIRKLDELLKEVEKVHKELKMSCAQESEDHKRSLDEVKKKLE

SEQ ID NO: 28209 - protein, 229 aa, Artificial Sequence
  Synthetic
SREELLDRILEAIAKILEDLKRLIDENLARLEEVVRELERIIDRNLKLIREILDELKKGSGSEEILEKIKKVDKELEDLIRRLLKKLEDLIRETERRLREILKRIRDLLKEVKDRDKDLERLLEVLEEVLRVIAELAKELLDSLRKVLKVVEEVLRLLNEVNKEVLDVIRELAKDGGSDEIIRKLDELLKEVEKVHKEVKDRIRKLLMSCAQESDEVKKKLERLLERAK

SEQ ID NO: 28210 - protein, 233 aa, Artificial Sequence
  Synthetic
SREELLDRILEAIAKILEDLKRLIDENLARLEEVVRELERIIDRNLKLIREILDELKKGSGSEEILEKIKKVDKELEDLIRRLLKKLEDLIRETERRLREILKRIRDLLKEVKDRDKDLERLLEVLEEVLRVIAELAKELLDSLRKVLKVVEEVLRLLNEVNKEVLDVIRELAKDGGSDEIIRKLDELLKEVEKVHKEVKDRIRKLLEDLKMSCAQESKKLERLLERAKEVVE

SEQ ID NO: 28211 - protein, 236 aa, Artificial Sequence
  Synthetic
SREELLDRILEAIAKILEDLKRLIDENLARLEEVVRELERIIDRNLKLIREILDELKKGSGSEEILEKIKKVDKELEDLIRRLLKKLEDLIRETERRLREILKRIRDLLKEVKDRDKDLERLLEVLEEVLRVIAELAKELLDSLRKVLKVVEEVLRLLNEVNKEVLDVIRELAKDGGSDEIIRKLDELLKEVEKVHKEVKDRIRKLLEDHKRLLMSCAQESERLLERAKEVVEREK

SEQ ID NO: 28212 - protein, 237 aa, Artificial Sequence
  Synthetic
SREELLDRILEAIAKILEDLKRLIDENLARLEEVVRELERIIDRNLKLIREILDELKKGSGSEEILEKIKKVDKELEDLIRRLLKKLEDLIRETERRLREILKRIRDLLKEVKDRDKDLERLLEVLEEVLRVIAELAKELLDSLRKVLKVVEEVLRLLNEVNKEVLDVIRELAKDGGSDEIIRKLDELLKEVEKVHKEVKDRIRKLLEDHKRSLDMSCAQESRLLERAKEVVEREKK

SEQ ID NO: 28213 - protein, 222 aa, Artificial Sequence; identical to SEQ ID NO: 28208
  Synthetic

SEQ ID NO: 28214 - protein, 229 aa, Artificial Sequence; identical to SEQ ID NO: 28209
  Synthetic

SEQ ID NO: 28215 - protein, 230 aa, Artificial Sequence
  Synthetic
SREELLDRILEAIAKILEDLKRLIDENLARLEEVVRELERIIDRNLKLIREILDELKKGSGSEEILEKIKKVDKELEDLIRRLLKKLEDLIRETERRLREILKRIRDLLKEVKDRDKDLERLLEVLEEVLRVIAELAKELLDSLRKVLKVVEEVLRLLNEVNKEVLDVIRELAKDGGSDEIIRKLDELLKEVEKVHKEVKDRIRKLLEMSCAQESEVKKKLERLLERAKE

SEQ ID NO: 28216 - protein, 233 aa, Artificial Sequence
  Synthetic
SREELLDRILEAIAKILEDLKRLIDENLARLEEVVRELERIIDRNLKLIREILDELKKGSGSEEILEKIKKVDKELEDLIRRLLKKLEDLIRETERRLREILKRIRDLLKEVKDRDKDLERLLEVLEEVLRVIAELAKELLDSLRKVLKVVEEVLRLLNEVNKEVLDVIRELAKDGGSDEIIRKLDELLKEVEKVHKEVKDRIRKLLEDLAMSCAQESKKLERLLERAKEVVE

SEQ ID NO: 28217 - protein, 236 aa, Artificial Sequence
  Synthetic
SREELLDRILEAIAKILEDLKRLIDENLARLEEVVRELERIIDRNLKLIREILDELKKGSGSEEILEKIKKVDKELEDLIRRLLKKLEDLIRETERRLREILKRIRDLLKEVKDRDKDLERLLEVLEEVLRVIAELAKELLDSLRKVLKVVEEVLRLLNEVNKEVLDVIRELAKDGGSDEIIRKLDELLKEVEKVHKEVKDRIRKLLEDHKRLCMSCAQESERLLERAKEVVEREK

SEQ ID NO: 28218 - protein, 237 aa, Artificial Sequence; identical to SEQ ID NO: 28212
  Synthetic

SEQ ID NO: 28219 - protein, 234 aa, Artificial Sequence
  Synthetic
SEREELLERIKEILKRVKDKLDEDLKRLKEILEKLKEKADRDLEELRRRIEEVREKLERTGRTDELVKEVLDTVRRNLENLKRLVEDILRKLEENVKNLTDLVREILKLITELIKRLEDGGLPKEVLDALRRVLEKLEELLREILERLKRSLEAVKRKIEELLKELERSLDELRRALERIRKEIGDSETAVRAIIRVLEKHLEAVRRVLELAMSCAQESLETVRELIERLKRVL

SEQ ID NO: 28220 - protein, 235 aa, Artificial Sequence
  Synthetic
SEREELLERIKEILKRVKDKLDEDLKRLKEILEKLKEKADRDLEELRRRIEEVREKLERTGRTDELVKEVLDTVRRNLENLKRLVEDILRKLEENVKNLTDLVREILKLITELIKRLEDGGLPKEVLDALRRVLEKLEELLREILERLKRSLEAVKRKIEELLKELERSLDELRRALERIRKEIGDSETAVRAIIRVLEKHLEAVRRVLEELLMSCAQESETVRELIERLKRVLE

SEQ ID NO: 28221 - protein, 238 aa, Artificial Sequence
  Synthetic
SEREELLERIKEILKRVKDKLDEDLKRLKEILEKLKEKADRDLEELRRRIEEVREKLERTGRTDELVKEVLDTVRRNLENLKRLVEDILRKLEENVKNLTDLVREILKLITELIKRLEDGGLPKEVLDALRRVLEKLEELLREILERLKRSLEAVKRKIEELLKELERSLDELRRALERIRKEIGDSETAVRAIIRVLEKHLEAVRRVLEELLKLTMSCAQESRELIERLKRVLEEAI

SEQ ID NO: 28222 - protein, 245 aa, Artificial Sequence
  Synthetic
SEREELLERIKEILKRVKDKLDEDLKRLKEILEKLKEKADRDLEELRRRIEEVREKLERTGRTDELVKEVLDTVRRNLENLKRLVEDILRKLEENVKNLTDLVREILKLITELIKRLEDGGLPKEVLDALRRVLEKLEELLREILERLKRSLEAVKRKIEELLKELERSLDELRRALERIRKEIGDSETAVRAIIRVLEKHLEAVRRVLEELLKVLAEHLELAMSCAQESKRVLEEAIEVVERVA

SEQ ID NO: 28223 - protein, 235 aa, Artificial Sequence; identical to SEQ ID NO: 28220
  Synthetic

SEQ ID NO: 28224 - protein, 238 aa, Artificial Sequence
  Synthetic
SEREELLERIKEILKRVKDKLDEDLKRLKEILEKLKEKADRDLEELRRRIEEVREKLERTGRTDELVKEVLDTVRRNLENLKRLVEDILRKLEENVKNLTDLVREILKLITELIKRLEDGGLPKEVLDALRRVLEKLEELLREILERLKRSLEAVKRKIEELLKELERSLDELRRALERIRKEIGDSETAVRAIIRVLEKHLEAVRRVLEELLKLQMSCAQESRELIERLKRVLEEAI

SEQ ID NO: 28225 - protein, 239 aa, Artificial Sequence
  Synthetic
SEREELLERIKEILKRVKDKLDEDLKRLKEILEKLKEKADRDLEELRRRIEEVREKLERTGRTDELVKEVLDTVRRNLENLKRLVEDILRKLEENVKNLTDLVREILKLITELIKRLEDGGLPKEVLDALRRVLEKLEELLREILERLKRSLEAVKRKIEELLKELERSLDELRRALERIRKEIGDSETAVRAIIRVLEKHLEAVRRVLEELLKVLAMSCAQESELIERLKRVLEEAIE

SEQ ID NO: 28226 - protein, 242 aa, Artificial Sequence
  Synthetic
SEREELLERIKEILKRVKDKLDEDLKRLKEILEKLKEKADRDLEELRRRIEEVREKLERTGRTDELVKEVLDTVRRNLENLKRLVEDILRKLEENVKNLTDLVREILKLITELIKRLEDGGLPKEVLDALRRVLEKLEELLREILERLKRSLEAVKRKIEELLKELERSLDELRRALERIRKEIGDSETAVRAIIRVLEKHLEAVRRVLEELLKVLAELLMSCAQESERLKRVLEEAIEVVE

SEQ ID NO: 28227 - protein, 245 aa, Artificial Sequence
  Synthetic
SEREELLERIKEILKRVKDKLDEDLKRLKEILEKLKEKADRDLEELRRRIEEVREKLERTGRTDELVKEVLDTVRRNLENLKRLVEDILRKLEENVKNLTDLVREILKLITELIKRLEDGGLPKEVLDALRRVLEKLEELLREILERLKRSLEAVKRKIEELLKELERSLDELRRALERIRKEIGDSETAVRAIIRVLEKHLEAVRRVLEELLKVLAEHLELVMSCAQESKRVLEEAIEVVERVA

SEQ ID NO: 28228 - protein, 246 aa, Artificial Sequence
  Synthetic
SEREELLERIKEILKRVKDKLDEDLKRLKEILEKLKEKADRDLEELRRRIEEVREKLERTGRTDELVKEVLDTVRRNLENLKRLVEDILRKLEENVKNLTDLVREILKLITELIKRLEDGGLPKEVLDALRRVLEKLEELLREILERLKRSLEAVKRKIEELLKELERSLDELRRALERIRKEIGDSETAVRAIIRVLEKHLEAVRRVLEELLKVLAEHLETLKMSCAQESRVLEEAIEVVERVAR

SEQ ID NO: 28229 - protein, 225 aa, Artificial Sequence
  Synthetic
DREKSVRDIEEDLKRVLDKLRRRVETSKEELKKVLKADKENADELEKTLRDVVRELDRGIDSEVLRAVREIVKRLVEVVRRYNELSEKIIRDLVRVNDRVLELLKRIVKRLIDVVRELEKIGDKEKALRRLEEVVKEVKRRIEELLKELEDVHRELVKILEEVNEDLKRVATEVKEIIKTGIKSSEVAKELDEVIKRLLDNLLMSCAQESEVIDRNLADLRDLAE

SEQ ID NO: 28230 - protein, 228 aa, Artificial Sequence
  Synthetic
DREKSVRDIEEDLKRVLDKLRRRVETSKEELKKVLKADKENADELEKTLRDVVRELDRGIDSEVLRAVREIVKRLVEVVRRYNELSEKIIRDLVRVNDRVLELLKRIVKRLIDVVRELEKIGDKEKALRRLEEVVKEVKRRIEELLKELEDVHRELVKILEEVNEDLKRVATEVKEIIKTGIKSSEVAKELDEVIKRLLDNLKELSMSCAQESDRNLADLRDLAEELR

SEQ ID NO: 28231 - protein, 229 aa, Artificial Sequence
  Synthetic
DREKSVRDIEEDLKRVLDKLRRRVETSKEELKKVLKADKENADELEKTLRDVVRELDRGIDSEVLRAVREIVKRLVEVVRRYNELSEKIIRDLVRVNDRVLELLKRIVKRLIDVVRELEKIGDKEKALRRLEEVVKEVKRRIEELLKELEDVHRELVKILEEVNEDLKRVATEVKEIIKTGIKSSEVAKELDEVIKRLLDNLKENLKMSCAQESRNLADLRDLAEELRA

SEQ ID NO: 28232 - protein, 232 aa, Artificial Sequence
  Synthetic
DREKSVRDIEEDLKRVLDKLRRRVETSKEELKKVLKADKENADELEKTLRDVVRELDRGIDSEVLRAVREIVKRLVEVVRRYNELSEKIIRDLVRVNDRVLELLKRIVKRLIDVVRELEKIGDKEKALRRLEEVVKEVKRRIEELLKELEDVHRELVKILEEVNEDLKRVATEVKEIIKTGIKSSEVAKELDEVIKRLLDNLKENTDRLKMSCAQESADLRDLAEELRAVIE

SEQ ID NO: 28233 - protein, 239 aa, Artificial Sequence
  Synthetic
DREKSVRDIEEDLKRVLDKLRRRVETSKEELKKVLKADKENADELEKTLRDVVRELDRGIDSEVLRAVREIVKRLVEVVRRYNELSEKIIRDLVRVNDRVLELLKRIVKRLIDVVRELEKIGDKEKALRRLEEVVKEVKRRIEELLKELEDVHRELVKILEEVNEDLKRVATEVKEIIKTGIKSSEVAKELDEVIKRLLDNLKENTDRLKEVIDRLGMSCAQESEELRAVIERLLEDAR

SEQ ID NO: 28234 - protein, 225 aa, Artificial Sequence; identical to SEQ ID NO: 28229
  Synthetic

SEQ ID NO: 28235 - protein, 232 aa, Artificial Sequence
  Synthetic
DREKSVRDIEEDLKRVLDKLRRRVETSKEELKKVLKADKENADELEKTLRDVVRELDRGIDSEVLRAVREIVKRLVEVVRRYNELSEKIIRDLVRVNDRVLELLKRIVKRLIDVVRELEKIGDKEKALRRLEEVVKEVKRRIEELLKELEDVHRELVKILEEVNEDLKRVATEVKEIIKTGIKSSEVAKELDEVIKRLLDNLKENTDRLWMSCAQESADLRDLAEELRAVIE

SEQ ID NO: 28236 - protein, 235 aa, Artificial Sequence
  Synthetic
DREKSVRDIEEDLKRVLDKLRRRVETSKEELKKVLKADKENADELEKTLRDVVRELDRGIDSEVLRAVREIVKRLVEVVRRYNELSEKIIRDLVRVNDRVLELLKRIVKRLIDVVRELEKIGDKEKALRRLEEVVKEVKRRIEELLKELEDVHRELVKILEEVNEDLKRVATEVKEIIKTGIKSSEVAKELDEVIKRLLDNLKENTDRLKELIMSCAQESRDLAEELRAVIERLL

SEQ ID NO: 28237 - protein, 251 aa, Artificial Sequence
  Synthetic
SLEEITKRLLELVEENLARHEEILRELLELAKRLAKEDRDILEEVLKLIEELLKLLEDNGSSEEDLKRLLKEVIEELRAVVKRVKDKWDEVVKRIEDLVKKLKELHDDTLRKLRELVRKIVTDISESGGEAEKVKRVVEKILELVERLAKVVKESVEKLLEILRELAEVSKRVAEALLRLLEELVRVIRIKDERTLREVVRKVLEEAKRLLDELEEVHKRVKKELEDLIMSCAQESKRVRDELREIKRELD

SEQ ID NO: 28238 - protein, 251 aa, Artificial Sequence
  Synthetic
SLEEITKRLLELVEENLARHEEILRELLELAKRLAKEDRDILEEVLKLIEELLKLLEDNGSSEEDLKRLLKEVIEELRAVVKRVKDKWDEVVKRIEDLVKKLKELHDDTLRKLRELVRKIVTDISESGGEAEKVKRVVEKILELVERLAKVVKESVEKLLEILRELAEVSKRVAEALLRLLEELVRVIRIKDERTLREVVRKVLEEAKRLLDELEEVHKRVKKELEDLEMSCAQESKRVRDELREIKRELD

SEQ ID NO: 28239 - protein, 226 aa, Artificial Sequence
  Synthetic
SAEEAVEKLVRIARAIVKINEDLSREVVRILREIVRLNEETTRLLVEIAREVVKVVEDGGLSEDVVRKLRKLVKELEDLLKKSNDDIRKLVEDVARRLKESNDEIRRLVERLEELLKRGPGDEELLRLVEELTEELLRTHEEVVKALEKLTADLLELHRELLERVRRLTKRIEEELKRVGVSEELLRRLEELRKRLEKVLDDLRMSCAQESRELERLLEESRRKLE

SEQ ID NO: 28240 - protein, 229 aa, Artificial Sequence
  Synthetic
SAEEAVEKLVRIARAIVKINEDLSREVVRILREIVRLNEETTRLLVEIAREVVKVVEDGGLSEDVVRKLRKLVKELEDLLKKSNDDIRKLVEDVARRLKESNDEIRRLVERLEELLKRGPGDEELLRLVEELTEELLRTHEEVVKALEKLTADLLELHRELLERVRRLTKRIEEELKRVGVSEELLRRLEELRKRLEKVLDDSAKLLMSCAQESERLLEESRRKLEKLK

SEQ ID NO: 28241 - protein, 230 aa, Artificial Sequence
  Synthetic
SAEEAVEKLVRIARAIVKINEDLSREVVRILREIVRLNEETTRLLVEIAREVVKVVEDGGLSEDVVRKLRKLVKELEDLLKKSNDDIRKLVEDVARRLKESNDEIRRLVERLEELLKRGPGDEELLRLVEELTEELLRTHEEVVKALEKLTADLLELHRELLERVRRLTKRIEEELKRVGVSEELLRRLEELRKRLEKVLDDSAKELKMSCAQESRLLEESRRKLEKLKR

SEQ ID NO: 28242 - protein, 233 aa, Artificial Sequence
  Synthetic
SAEEAVEKLVRIARAIVKINEDLSREVVRILREIVRLNEETTRLLVEIAREVVKVVEDGGLSEDVVRKLRKLVKELEDLLKKSNDDIRKLVEDVARRLKESNDEIRRLVERLEELLKRGPGDEELLRLVEELTEELLRTHEEVVKALEKLTADLLELHRELLERVRRLTKRIEEELKRVGVSEELLRRLEELRKRLEKVLDDSAKELEKLAMSCAQESEESRRKLEKLKRDLE

SEQ ID NO: 28243 - protein, 236 aa, Artificial Sequence
  Synthetic
SAEEAVEKLVRIARAIVKINEDLSREVVRILREIVRLNEETTRLLVEIAREVVKVVEDGGLSEDVVRKLRKLVKELEDLLKKSNDDIRKLVEDVARRLKESNDEIRRLVERLEELLKRGPGDEELLRLVEELTEELLRTHEEVVKALEKLTADLLELHRELLERVRRLTKRIEEELKRVGVSEELLRRLEELRKRLEKVLDDSAKELEKLKRLLMSCAQESRRKLEKLKRDLERVL

SEQ ID NO: 28244 - protein, 226 aa, Artificial Sequence
  Synthetic
SAEEAVEKLVRIARAIVKINEDLSREVVRILREIVRLNEETTRLLVEIAREVVKVVEDGGLSEDVVRKLRKLVKELEDLLKKSNDDIRKLVEDVARRLKESNDEIRRLVERLEELLKRGPGDEELLRLVEELTEELLRTHEEVVKALEKLTADLLELHRELLERVRRLTKRIEEELKRVGVSEELLRRLEELRKRLEKVLDDLAMSCAQESRELERLLEESRRKLE

SEQ ID NO: 28245 - protein, 229 aa, Artificial Sequence
  Synthetic
SAEEAVEKLVRIARAIVKINEDLSREVVRILREIVRLNEETTRLLVEIAREVVKVVEDGGLSEDVVRKLRKLVKELEDLLKKSNDDIRKLVEDVARRLKESNDEIRRLVERLEELLKRGPGDEELLRLVEELTEELLRTHEEVVKALEKLTADLLELHRELLERVRRLTKRIEEELKRVGVSEELLRRLEELRKRLEKVLDDSAKLAMSCAQESERLLEESRRKLEKLK

SEQ ID NO: 28246 - protein, 230 aa, Artificial Sequence; identical to SEQ ID NO: 28241
  Synthetic

SEQ ID NO: 28247 - protein, 233 aa, Artificial Sequence
  Synthetic
SAEEAVEKLVRIARAIVKINEDLSREVVRILREIVRLNEETTRLLVEIAREVVKVVEDGGLSEDVVRKLRKLVKELEDLLKKSNDDIRKLVEDVARRLKESNDEIRRLVERLEELLKRGPGDEELLRLVEELTEELLRTHEEVVKALEKLTADLLELHRELLERVRRLTKRIEEELKRVGVSEELLRRLEELRKRLEKVLDDSAKELEKLVMSCAQESEESRRKLEKLKRDLE

SEQ ID NO: 28248 - protein, 236 aa, Artificial Sequence; identical to SEQ ID NO: 28243
  Synthetic

SEQ ID NO: 28249 - protein, 228 aa, Artificial Sequence
  Synthetic
REDEVLRDIERLLREIEEKIRRILEESTAELRKVEEEVKRIIERTKRELKAIKEDVERKGIDEELRKLLDEVLDKLTKLIERNKRSLERILELIKRIIDENLEVLRDIIRLLEELLKATKDNGVPKDEVIKLVEDVVRRIEELVTRVVARNEKLVKDLDDLAKKNVRENEELLREIDRGLDEDLLEKIKRVIREHIKALEKLARLLMSCAQESIEALKELARDLAEVI

SEQ ID NO: 28250 - protein, 229 aa, Artificial Sequence
  Synthetic
REDEVLRDIERLLREIEEKIRRILEESTAELRKVEEEVKRIIERTKRELKAIKEDVERKGIDEELRKLLDEVLDKLTKLIERNKRSLERILELIKRIIDENLEVLRDIIRLLEELLKATKDNGVPKDEVIKLVEDVVRRIEELVTRVVARNEKLVKDLDDLAKKNVRENEELLREIDRGLDEDLLEKIKRVIREHIKALEKLARDLKMSCAQESEALKELARDLAEVIR

SEQ ID NO: 28251 - protein, 233 aa, Artificial Sequence
  Synthetic
REDEVLRDIERLLREIEEKIRRILEESTAELRKVEEEVKRIIERTKRELKAIKEDVERKGIDEELRKLLDEVLDKLTKLIERNKRSLERILELIKRIIDENLEVLRDIIRLLEELLKATKDNGVPKDEVIKLVEDVVRRIEELVTRVVARNEKLVKDLDDLAKKNVRENEELLREIDRGLDEDLLEKIKRVIREHIKALEKLARDLKEILRMSCAQESELARDLAEVIRKLLE

SEQ ID NO: 28252 - protein, 236 aa, Artificial Sequence
  Synthetic
REDEVLRDIERLLREIEEKIRRILEESTAELRKVEEEVKRIIERTKRELKAIKEDVERKGIDEELRKLLDEVLDKLTKLIERNKRSLERILELIKRIIDENLEVLRDIIRLLEELLKATKDNGVPKDEVIKLVEDVVRRIEELVTRVVARNEKLVKDLDDLAKKNVRENEELLREIDRGLDEDLLEKIKRVIREHIKALEKLARDLKEILRRLIMSCAQESRDLAEVIRKLLEDVK

SEQ ID NO: 28253 - protein, 225 aa, Artificial Sequence
  Synthetic
REDEVLRDIERLLREIEEKIRRILEESTAELRKVEEEVKRIIERTKRELKAIKEDVERKGIDEELRKLLDEVLDKLTKLIERNKRSLERILELIKRIIDENLEVLRDIIRLLEELLKATKDNGVPKDEVIKLVEDVVRRIEELVTRVVARNEKLVKDLDDLAKKNVRENEELLREIDRGLDEDLLEKIKRVIREHIKALEKLAMSCAQESRRHIEALKELARDLA

SEQ ID NO: 28254 - protein, 229 aa, Artificial Sequence; identical to SEQ ID NO: 28250
  Synthetic

SEQ ID NO: 28255 - protein, 233 aa, Artificial Sequence; identical to SEQ ID NO: 28251
  Synthetic

SEQ ID NO: 28256 - protein, 236 aa, Artificial Sequence; identical to SEQ ID NO: 28252
  Synthetic

SEQ ID NO: 28257 - protein, 222 aa, Artificial Sequence
  Synthetic
SREDLLRSLAELIETILRKSSELLDRLLKLVREHSETSERLIRELKKILEDILKLIKGGISEDDVRRIVKEAKDELRRSVEEVKKSVDDLKEELKRSLREVRELVKSIADALEEIVRRSSGLGEVIKKLLELLRRLLEVHERTIRLLAELLERHLEVHEESIRLLLRLLEELLELVERKGDEKELRRIAEAVERVLRDLLMSCAQESRDVEEVLRRHLEELA

SEQ ID NO: 28258 - protein, 225 aa, Artificial Sequence
  Synthetic
SREDLLRSLAELIETILRKSSELLDRLLKLVREHSETSERLIRELKKILEDILKLIKGGISEDDVRRIVKEAKDELRRSVEEVKKSVDDLKEELKRSLREVRELVKSIADALEEIVRRSSGLGEVIKKLLELLRRLLEVHERTIRLLAELLERHLEVHEESIRLLLRLLEELLELVERKGDEKELRRIAEAVERVLRDHKALDMSCAQESEEVLRRHLEELARIL

SEQ ID NO: 28259 - protein, 229 aa, Artificial Sequence
  Synthetic
SREDLLRSLAELIETILRKSSELLDRLLKLVREHSETSERLIRELKKILEDILKLIKGGISEDDVRRIVKEAKDELRRSVEEVKKSVDDLKEELKRSLREVRELVKSIADALEEIVRRSSGLGEVIKKLLELLRRLLEVHERTIRLLAELLERHLEVHEESIRLLLRLLEELLELVERKGDEKELRRIAEAVERVLRDHKAKNDKLLMSCAQESRRHLEELARILKDVK

SEQ ID NO: 28260 - protein, 232 aa, Artificial Sequence
  Synthetic
SREDLLRSLAELIETILRKSSELLDRLLKLVREHSETSERLIRELKKILEDILKLIKGGISEDDVRRIVKEAKDELRRSVEEVKKSVDDLKEELKRSLREVRELVKSIADALEEIVRRSSGLGEVIKKLLELLRRLLEVHERTIRLLAELLERHLEVHEESIRLLLRLLEELLELVERKGDEKELRRIAEAVERVLRDHKAKNDKILRLVMSCAQESLEELARILKDVKKVL

SEQ ID NO: 28261 - protein, 229 aa, Artificial Sequence; identical to SEQ ID NO: 28259
  Synthetic

SEQ ID NO: 28262 - protein, 232 aa, Artificial Sequence
  Synthetic
SREDLLRSLAELIETILRKSSELLDRLLKLVREHSETSERLIRELKKILEDILKLIKGGISEDDVRRIVKEAKDELRRSVEEVKKSVDDLKEELKRSLREVRELVKSIADALEEIVRRSSGLGEVIKKLLELLRRLLEVHERTIRLLAELLERHLEVHEESIRLLLRLLEELLELVERKGDEKELRRIAEAVERVLRDHKAKNDKILRLCMSCAQESLEELARILKDVKKVL

SEQ ID NO: 28263 - protein, 234 aa, Artificial Sequence
  Synthetic
SEEDEVLKTLDRKHKEAKKELDKVLRELEEEHKKVKRELDEVLKRLEDIHRRITELLRRGGISLEDVLRMVKEANRELVEVIKRIVKTVEDLNARAVEVVKRLAEELERLNAEMVKVLRKSGRSEEIEKDLRRSSADIRRLVEEIERRLRDSLRKLRKLADDLAKKLKESLDKLEELVRRGVDEEAVERVLKENKELIEEIVRLIRKILDLNMSCAQESVRLLERLLRENLRLI

SEQ ID NO: 28264 - protein, 235 aa, Artificial Sequence
  Synthetic
SEEDEVLKTLDRKHKEAKKELDKVLRELEEEHKKVKRELDEVLKRLEDIHRRITELLRRGGISLEDVLRMVKEANRELVEVIKRIVKTVEDLNARAVEVVKRLAEELERLNAEMVKVLRKSGRSEEIEKDLRRSSADIRRLVEEIERRLRDSLRKLRKLADDLAKKLKESLDKLEELVRRGVDEEAVERVLKENKELIEEIVRLIRKILDELLMSCAQESRLLERLLRENLRLIE

SEQ ID NO: 28265 - protein, 239 aa, Artificial Sequence
  Synthetic
SEEDEVLKTLDRKHKEAKKELDKVLRELEEEHKKVKRELDEVLKRLEDIHRRITELLRRGGISLEDVLRMVKEANRELVEVIKRIVKTVEDLNARAVEVVKRLAEELERLNAEMVKVLRKSGRSEEIEKDLRRSSADIRRLVEEIERRLRDSLRKLRKLADDLAKKLKESLDKLEELVRRGVDEEAVERVLKENKELIEEIVRLIRKILDENIELLRMSCAQESRLLRENLRLIEEARK

SEQ ID NO: 28266 - protein, 228 aa, Artificial Sequence
  Synthetic
SEEDEVLKTLDRKHKEAKKELDKVLRELEEEHKKVKRELDEVLKRLEDIHRRITELLRRGGISLEDVLRMVKEANRELVEVIKRIVKTVEDLNARAVEVVKRLAEELERLNAEMVKVLRKSGRSEEIEKDLRRSSADIRRLVEEIERRLRDSLRKLRKLADDLAKKLKESLDKLEELVRRGVDEEAVERVLKENKELIEEIVRLLQMSCAQESELIRRIVRLLERLLR

SEQ ID NO: 28267 - protein, 231 aa, Artificial Sequence
  Synthetic
SEEDEVLKTLDRKHKEAKKELDKVLRELEEEHKKVKRELDEVLKRLEDIHRRITELLRRGGISLEDVLRMVKEANRELVEVIKRIVKTVEDLNARAVEVVKRLAEELERLNAEMVKVLRKSGRSEEIEKDLRRSSADIRRLVEEIERRLRDSLRKLRKLADDLAKKLKESLDKLEELVRRGVDEEAVERVLKENKELIEEIVRLIRKLLMSCAQESRRIVRLLERLLRENL

SEQ ID NO: 28268 - protein, 238 aa, Artificial Sequence
  Synthetic
SEEDEVLKTLDRKHKEAKKELDKVLRELEEEHKKVKRELDEVLKRLEDIHRRITELLRRGGISLEDVLRMVKEANRELVEVIKRIVKTVEDLNARAVEVVKRLAEELERLNAEMVKVLRKSGRSEEIEKDLRRSSADIRRLVEEIERRLRDSLRKLRKLADDLAKKLKESLDKLEELVRRGVDEEAVERVLKENKELIEEIVRLIRKILDENIELIMSCAQESERLLRENLRLIEEAR

SEQ ID NO: 28269 - protein, 239 aa, Artificial Sequence
  Synthetic
SEEDEVLKTLDRKHKEAKKELDKVLRELEEEHKKVKRELDEVLKRLEDIHRRITELLRRGGISLEDVLRMVKEANRELVEVIKRIVKTVEDLNARAVEVVKRLAEELERLNAEMVKVLRKSGRSEEIEKDLRRSSADIRRLVEEIERRLRDSLRKLRKLADDLAKKLKESLDKLEELVRRGVDEEAVERVLKENKELIEEIVRLIRKILDENIELLKMSCAQESRLLRENLRLIEEARK

SEQ ID NO: 28270 - protein, 236 aa, Artificial Sequence
  Synthetic
SKEEDVRRLIEELVRELRRILEENRRMLKELVEKLEEVLRRSEEVWRRLAKELDELLKEGNSDAVREAVETIRRVLEDLVELDRRVVKVIKEVLERHAKSSTELVRELEDVLRAAVEAIEKGKSEEDLKRELRKLKERLKSVLKRHDDTNKELFRELEDVLRKHEEELRRLADELRRLLEDLKRSGDIPEEVIKKIEDLVRKTERELREVHKLLMSCAQESKEVVDRSVEILRDLV

SEQ ID NO: 28271 - protein, 240 aa, Artificial Sequence
  Synthetic
SKEEDVRRLIEELVRELRRILEENRRMLKELVEKLEEVLRRSEEVWRRLAKELDELLKEGNSDAVREAVETIRRVLEDLVELDRRVVKVIKEVLERHAKSSTELVRELEDVLRAAVEAIEKGKSEEDLKRELRKLKERLKSVLKRHDDTNKELFRELEDVLRKHEEELRRLADELRRLLEDLKRSGDIPEEVIKKIEDLVRKTERELREVHKELRRLVMSCAQESDRSVEILRDLVRKIV

SEQ ID NO: 28272 - protein, 241 aa, Artificial Sequence
  Synthetic
SKEEDVRRLIEELVRELRRILEENRRMLKELVEKLEEVLRRSEEVWRRLAKELDELLKEGNSDAVREAVETIRRVLEDLVELDRRVVKVIKEVLERHAKSSTELVRELEDVLRAAVEAIEKGKSEEDLKRELRKLKERLKSVLKRHDDTNKELFRELEDVLRKHEEELRRLADELRRLLEDLKRSGDIPEEVIKKIEDLVRKTERELREVHKELRRLLEMSCAQESRSVEILRDLVRKIVR

SEQ ID NO: 28273 - protein, 244 aa, Artificial Sequence
  Synthetic
SKEEDVRRLIEELVRELRRILEENRRMLKELVEKLEEVLRRSEEVWRRLAKELDELLKEGNSDAVREAVETIRRVLEDLVELDRRVVKVIKEVLERHAKSSTELVRELEDVLRAAVEAIEKGKSEEDLKRELRKLKERLKSVLKRHDDTNKELFRELEDVLRKHEEELRRLADELRRLLEDLKRSGDIPEEVIKKIEDLVRKTERELREVHKELRRLVEELYMSCAQESEILRDLVRKIVRILE

SEQ ID NO: 28274 - protein, 247 aa, Artificial Sequence
  Synthetic
SKEEDVRRLIEELVRELRRILEENRRMLKELVEKLEEVLRRSEEVWRRLAKELDELLKEGNSDAVREAVETIRRVLEDLVELDRRVVKVIKEVLERHAKSSTELVRELEDVLRAAVEAIEKGKSEEDLKRELRKLKERLKSVLKRHDDTNKELFRELEDVLRKHEEELRRLADELRRLLEDLKRSGDIPEEVIKKIEDLVRKTERELREVHKELRRLVEEAKELMMSCAQESRDLVRKIVRILEESA

SEQ ID NO: 28275 - protein, 248 aa, Artificial Sequence
  Synthetic
SKEEDVRRLIEELVRELRRILEENRRMLKELVEKLEEVLRRSEEVWRRLAKELDELLKEGNSDAVREAVETIRRVLEDLVELDRRVVKVIKEVLERHAKSSTELVRELEDVLRAAVEAIEKGKSEEDLKRELRKLKERLKSVLKRHDDTNKELFRELEDVLRKHEEELRRLADELRRLLEDLKRSGDIPEEVIKKIEDLVRKTERELREVHKELRRLVEEAKEVLDMSCAQESDLVRKIVRILEESAR

SEQ ID NO: 28276 - protein, 221 aa, Artificial Sequence
  Synthetic
SEKEAIKEVAELLKALIDDLLRLLKEDVDTARRVLDEIKKLLEENESIAREVLRRLREGKGAERAEELVREWIERTREILKRIEELLRRWTRKTREILKRIEELVRRVIEVVRRGGVPKELVDKLEEVLRKLLKLVEDHVRKVEKIISELLKLIKEHVEKVERIARKLLELLRRGGDETDLDRIVKEMEKVLEDSIRLLMSCAQESEDILRESEKALRDLL

SEQ ID NO: 28277 - protein, 225 aa, Artificial Sequence
  Synthetic
SEKEAIKEVAELLKALIDDLLRLLKEDVDTARRVLDEIKKLLEENESIAREVLRRLREGKGAERAEELVREWIERTREILKRIEELLRRWTRKTREILKRIEELVRRVIEVVRRGGVPKELVDKLEEVLRKLLKLVEDHVRKVEKIISELLKLIKEHVEKVERIARKLLELLRRGGDETDLDRIVKEMEKVLEDSIRELEKLLMSCAQESRESEKALRDLLSELA

SEQ ID NO: 28278 - protein, 228 aa, Artificial Sequence
  Synthetic
SEKEAIKEVAELLKALIDDLLRLLKEDVDTARRVLDEIKKLLEENESIAREVLRRLREGKGAERAEELVREWIERTREILKRIEELLRRWTRKTREILKRIEELVRRVIEVVRRGGVPKELVDKLEEVLRKLLKLVEDHVRKVEKIISELLKLIKEHVEKVERIARKLLELLRRGGDETDLDRIVKEMEKVLEDSIRELEKLVKLLMSCAQESEKALRDLLSELAKVL

SEQ ID NO: 28279 - protein, 232 aa, Artificial Sequence
  Synthetic
SEKEAIKEVAELLKALIDDLLRLLKEDVDTARRVLDEIKKLLEENESIAREVLRRLREGKGAERAEELVREWIERTREILKRIEELLRRWTRKTREILKRIEELVRRVIEVVRRGGVPKELVDKLEEVLRKLLKLVEDHVRKVEKIISELLKLIKEHVEKVERIARKLLELLRRGGDETDLDRIVKEMEKVLEDSIRELEKLVKRLEDLFMSCAQESRDLLSELAKVLEEVR

SEQ ID NO: 28280 - protein, 221 aa, Artificial Sequence; identical to SEQ ID NO: 28276
  Synthetic

SEQ ID NO: 28281 - protein, 228 aa, Artificial Sequence; identical to SEQ ID NO: 28278
  Synthetic

SEQ ID NO: 28282 - protein, 229 aa, Artificial Sequence
  Synthetic
SEKEAIKEVAELLKALIDDLLRLLKEDVDTARRVLDEIKKLLEENESIAREVLRRLREGKGAERAEELVREWIERTREILKRIEELLRRWTRKTREILKRIEELVRRVIEVVRRGGVPKELVDKLEEVLRKLLKLVEDHVRKVEKIISELLKLIKEHVEKVERIARKLLELLRRGGDETDLDRIVKEMEKVLEDSIRELEKLVKRLEMSCAQESKALRDLLSELAKVLE

SEQ ID NO: 28283 - protein, 232 aa, Artificial Sequence; identical to SEQ ID NO: 28279
  Synthetic

SEQ ID NO: 28284 - protein, 233 aa, Artificial Sequence
  Synthetic
SEKEAIKEVAELLKALIDDLLRLLKEDVDTARRVLDEIKKLLEENESIAREVLRRLREGKGAERAEELVREWIERTREILKRIEELLRRWTRKTREILKRIEELVRRVIEVVRRGGVPKELVDKLEEVLRKLLKLVEDHVRKVEKIISELLKLIKEHVEKVERIARKLLELLRRGGDETDLDRIVKEMEKVLEDSIRELEKLVKRLEDILKMSCAQESDLLSELAKVLEEVRT

SEQ ID NO: 28285 - protein, 222 aa, Artificial Sequence
  Synthetic
SREELLKELRKLVEEIKRRSEELLRRLEKLLEDNERRTRELLERLKELLREIEERIRGGGPSEEVIRLLEELVRAIERVLEEHLESNRRLVEAAESVLREHVELVKSLVRAIEDVVEKGLSEDKIRTIKKLLDEWARRLEKLVRDVRRKLEEWIKRTEEMIDEVARLLEELKETIRRKGGDEDTVRELTELVRRLLKRLGMSCAQESEILRELIKAIADAIK

SEQ ID NO: 28286 - protein, 232 aa, Artificial Sequence
  Synthetic
SREELLKELRKLVEEIKRRSEELLRRLEKLLEDNERRTRELLERLKELLREIEERIRGGGPSEEVIRLLEELVRAIERVLEEHLESNRRLVEAAESVLREHVELVKSLVRAIEDVVEKGLSEDKIRTIKKLLDEWARRLEKLVRDVRRKLEEWIKRTEEMIDEVARLLEELKETIRRKGGDEDTVRELTELVRRLLKRVEELLKRSLELAMSCAQESADAIKESLDILDRLL

SEQ ID NO: 28287 - protein, 233 aa, Artificial Sequence
  Synthetic
SREELLKELRKLVEEIKRRSEELLRRLEKLLEDNERRTRELLERLKELLREIEERIRGGGPSEEVIRLLEELVRAIERVLEEHLESNRRLVEAAESVLREHVELVKSLVRAIEDVVEKGLSEDKIRTIKKLLDEWARRLEKLVRDVRRKLEEWIKRTEEMIDEVARLLEELKETIRRKGGDEDTVRELTELVRRLLKRVEELLKRSLEILIMSCAQESDAIKESLDILDRLLR

SEQ ID NO: 28288 - protein, 222 aa, Artificial Sequence
  Synthetic
SREELLKELRKLVEEIKRRSEELLRRLEKLLEDNERRTRELLERLKELLREIEERIRGGGPSEEVIRLLEELVRAIERVLEEHLESNRRLVEAAESVLREHVELVKSLVRAIEDVVEKGLSEDKIRTIKKLLDEWARRLEKLVRDVRRKLEEWIKRTEEMIDEVARLLEELKETIRRKGGDEDTVRELTELVRRLLKRLAMSCAQESEILRELIKAIADAIK

SEQ ID NO: 28289 - protein, 232 aa, Artificial Sequence
  Synthetic
SREELLKELRKLVEEIKRRSEELLRRLEKLLEDNERRTRELLERLKELLREIEERIRGGGPSEEVIRLLEELVRAIERVLEEHLESNRRLVEAAESVLREHVELVKSLVRAIEDVVEKGLSEDKIRTIKKLLDEWARRLEKLVRDVRRKLEEWIKRTEEMIDEVARLLEELKETIRRKGGDEDTVRELTELVRRLLKRVEELLKRSLELLMSCAQESADAIKESLDILDRLL

SEQ ID NO: 28290 - protein, 233 aa, Artificial Sequence
  Synthetic
SREELLKELRKLVEEIKRRSEELLRRLEKLLEDNERRTRELLERLKELLREIEERIRGGGPSEEVIRLLEELVRAIERVLEEHLESNRRLVEAAESVLREHVELVKSLVRAIEDVVEKGLSEDKIRTIKKLLDEWARRLEKLVRDVRRKLEEWIKRTEEMIDEVARLLEELKETIRRKGGDEDTVRELTELVRRLLKRVEELLKRSLEILKMSCAQESDAIKESLDILDRLLR

SEQ ID NO: 28291 - protein, 236 aa, Artificial Sequence
  Synthetic
SREELLKELRKLVEEIKRRSEELLRRLEKLLEDNERRTRELLERLKELLREIEERIRGGGPSEEVIRLLEELVRAIERVLEEHLESNRRLVEAAESVLREHVELVKSLVRAIEDVVEKGLSEDKIRTIKKLLDEWARRLEKLVRDVRRKLEEWIKRTEEMIDEVARLLEELKETIRRKGGDEDTVRELTELVRRLLKRVEELLKRSLEILRELIMSCAQESKESLDILDRLLREVA

SEQ ID NO: 28292 - protein, 229 aa, Artificial Sequence
  Synthetic
SEAERLADEVRKAVKKSEEDNETLVREVEKAVRELKKNNKTWVDEVRKLMKRLVDLLRDGQVSDRDLLKELEEVLRRVLEALAENHERTEEILKRWLDRYAEDIERLRKVLKEVIEALKRGGSDDKRIVDELEEILRRNEDVLDKIAKRLRRLLEEDRRLLERIVRELKRLLDDLDRITKEGKSEELVRIAIEVLKRLLEIIEELLRMSCAQESRLLKIVRELHKDNIK

SEQ ID NO: 28293 - protein, 231 aa, Artificial Sequence
  Synthetic
SEAERLADEVRKAVKKSEEDNETLVREVEKAVRELKKNNKTWVDEVRKLMKRLVDLLRDGQVSDRDLLKELEEVLRRVLEALAENHERTEEILKRWLDRYAEDIERLRKVLKEVIEALKRGGSDDKRIVDELEEILRRNEDVLDKIAKRLRRLLEEDRRLLERIVRELKRLLDDLDRITKEGKSEELVRIAIEVLKRLLEIIEELVRLAMSCAQESLKIVRELHKDNIKIL

SEQ ID NO: 28294 - protein, 232 aa, Artificial Sequence
  Synthetic
SEAERLADEVRKAVKKSEEDNETLVREVEKAVRELKKNNKTWVDEVRKLMKRLVDLLRDGQVSDRDLLKELEEVLRRVLEALAENHERTEEILKRWLDRYAEDIERLRKVLKEVIEALKRGGSDDKRIVDELEEILRRNEDVLDKIAKRLRRLLEEDRRLLERIVRELKRLLDDLDRITKEGKSEELVRIAIEVLKRLLEIIEELVRLLNMSCAQESKIVRELHKDNIKILE

SEQ ID NO: 28295 - protein, 235 aa, Artificial Sequence
  Synthetic
SEAERLADEVRKAVKKSEEDNETLVREVEKAVRELKKNNKTWVDEVRKLMKRLVDLLRDGQVSDRDLLKELEEVLRRVLEALAENHERTEEILKRWLDRYAEDIERLRKVLKEVIEALKRGGSDDKRIVDELEEILRRNEDVLDKIAKRLRRLLEEDRRLLERIVRELKRLLDDLDRITKEGKSEELVRIAIEVLKRLLEIIEELVRLNNELLMSCAQESRELHKDNIKILEDLL

SEQ ID NO: 28296 - protein, 236 aa, Artificial Sequence
  Synthetic
SEAERLADEVRKAVKKSEEDNETLVREVEKAVRELKKNNKTWVDEVRKLMKRLVDLLRDGQVSDRDLLKELEEVLRRVLEALAENHERTEEILKRWLDRYAEDIERLRKVLKEVIEALKRGGSDDKRIVDELEEILRRNEDVLDKIAKRLRRLLEEDRRLLERIVRELKRLLDDLDRITKEGKSEELVRIAIEVLKRLLEIIEELVRLNNEILEMSCAQESELHKDNIKILEDLLR

SEQ ID NO: 28297 - protein, 238 aa, Artificial Sequence
  Synthetic
SEAERLADEVRKAVKKSEEDNETLVREVEKAVRELKKNNKTWVDEVRKLMKRLVDLLRDGQVSDRDLLKELEEVLRRVLEALAENHERTEEILKRWLDRYAEDIERLRKVLKEVIEALKRGGSDDKRIVDELEEILRRNEDVLDKIAKRLRRLLEEDRRLLERIVRELKRLLDDLDRITKEGKSEELVRIAIEVLKRLLEIIEELVRLNNEILELQMSCAQESHKDNIKILEDLLRII

SEQ ID NO: 28298 - protein, 243 aa, Artificial Sequence
  Synthetic
SEAERLADEVRKAVKKSEEDNETLVREVEKAVRELKKNNKTWVDEVRKLMKRLVDLLRDGQVSDRDLLKELEEVLRRVLEALAENHERTEEILKRWLDRYAEDIERLRKVLKEVIEALKRGGSDDKRIVDELEEILRRNEDVLDKIAKRLRRLLEEDRRLLERIVRELKRLLDDLDRITKEGKSEELVRIAIEVLKRLLEIIEELVRLNNEILERLLKILRMSCAQESKILEDLLRIIEEVLR

SEQ ID NO: 28299 - protein, 229 aa, Artificial Sequence; identical to SEQ ID NO: 28292
  Synthetic

SEQ ID NO: 28300 - protein, 231 aa, Artificial Sequence; identical to SEQ ID NO: 28293
  Synthetic

SEQ ID NO: 28301 - protein, 232 aa, Artificial Sequence; identical to SEQ ID NO: 28294
  Synthetic

SEQ ID NO: 28302 - protein, 235 aa, Artificial Sequence; identical to SEQ ID NO: 28295
  Synthetic

SEQ ID NO: 28303 - protein, 236 aa, Artificial Sequence; identical to SEQ ID NO: 28296
  Synthetic

SEQ ID NO: 28304 - protein, 238 aa, Artificial Sequence
  Synthetic
SEAERLADEVRKAVKKSEEDNETLVREVEKAVRELKKNNKTWVDEVRKLMKRLVDLLRDGQVSDRDLLKELEEVLRRVLEALAENHERTEEILKRWLDRYAEDIERLRKVLKEVIEALKRGGSDDKRIVDELEEILRRNEDVLDKIAKRLRRLLEEDRRLLERIVRELKRLLDDLDRITKEGKSEELVRIAIEVLKRLLEIIEELVRLNNEILELCMSCAQESHKDNIKILEDLLRII

SEQ ID NO: 28305 - protein, 243 aa, Artificial Sequence
  Synthetic
SEAERLADEVRKAVKKSEEDNETLVREVEKAVRELKKNNKTWVDEVRKLMKRLVDLLRDGQVSDRDLLKELEEVLRRVLEALAENHERTEEILKRWLDRYAEDIERLRKVLKEVIEALKRGGSDDKRIVDELEEILRRNEDVLDKIAKRLRRLLEEDRRLLERIVRELKRLLDDLDRITKEGKSEELVRIAIEVLKRLLEIIEELVRLNNEILERLLKILIMSCAQESKILEDLLRIIEEVLR

SEQ ID NO: 28306 - protein, 240 aa, Artificial Sequence
  Synthetic
SEKDEVTRRIRELLKEAEETNREAIERIKRLLDRVREAVEEVAKRSEELLRRLKKVLDRGLQDDEALLKLLIDALREHNRLSTELIKILIDVLRTILKIIKDVLATNIEIARRILDLVRRLAERGGLDDRLVKEVEKLVRTAERLHRDALRKVKRLVEELEKRLRELVKTDHDLVRRLETLLRRGSGSKEDLLREIARILAESLRLIRELLKEIEKLTMSCAQESERLNDELRKIIEAIL

SEQ ID NO: 28307 - protein, 236 aa, Artificial Sequence
  Synthetic
SEKDEVTRRIRELLKEAEETNREAIERIKRLLDRVREAVEEVAKRSEELLRRLKKVLDRGLQDDEALLKLLIDALREHNRLSTELIKILIDVLRTILKIIKDVLATNIEIARRILDLVRRLAERGGLDDRLVKEVEKLVRTAERLHRDALRKVKRLVEELEKRLRELVKTDHDLVRRLETLLRRGSGSKEDLLREIARILAESLRLIRELLKLIMSCAQESIELLERLNDELRKII

SEQ ID NO: 28308 - protein, 240 aa, Artificial Sequence
  Synthetic
SEKDEVTRRIRELLKEAEETNREAIERIKRLLDRVREAVEEVAKRSEELLRRLKKVLDRGLQDDEALLKLLIDALREHNRLSTELIKILIDVLRTILKIIKDVLATNIEIARRILDLVRRLAERGGLDDRLVKEVEKLVRTAERLHRDALRKVKRLVEELEKRLRELVKTDHDLVRRLETLLRRGSGSKEDLLREIARILAESLRLIRELLKEIEKLVMSCAQESERLNDELRKIIEAIL

SEQ ID NO: 28309 - protein, 227 aa, Artificial Sequence
  Synthetic
SAEDLVRRVKDLVDKLEDKLRKVVRTNERLWEEIRKRLEELVRRNKELWDALVEKLKAGDKDKDELIEEAKSLEDESNALVEKLVRDIERVLAESNKLLDTLAKEIEEVLEEIVELVERGSGSDKEAREKLEDIKARLKEVLKKLREESKRIIDELRRLLEEYKRLVKEIRDRIEEVRKRNSEIRVLVELVRRHNKVLKELVELLMSCAQESNRVVEEVVRELVELL

SEQ ID NO: 28310 - protein, 235 aa, Artificial Sequence
  Synthetic
SAEDLVRRVKDLVDKLEDKLRKVVRTNERLWEEIRKRLEELVRRNKELWDALVEKLKAGDKDKDELIEEAKSLEDESNALVEKLVRDIERVLAESNKLLDTLAKEIEEVLEEIVELVERGSGSDKEAREKLEDIKARLKEVLKKLREESKRIIDELRRLLEEYKRLVKEIRDRIEEVRKRNSEIRVLVELVRRHNKVLKELVEELEKLVRDLVMSCAQESRELVELLSRAVEVIK

SEQ ID NO: 28311 - protein, 239 aa, Artificial Sequence
  Synthetic
SAEDLVRRVKDLVDKLEDKLRKVVRTNERLWEEIRKRLEELVRRNKELWDALVEKLKAGDKDKDELIEEAKSLEDESNALVEKLVRDIERVLAESNKLLDTLAKEIEEVLEEIVELVERGSGSDKEAREKLEDIKARLKEVLKKLREESKRIIDELRRLLEEYKRLVKEIRDRIEEVRKRNSEIRVLVELVRRHNKVLKELVEELEKLVRDHNRVLAMSCAQESELLSRAVEVIKEVVK

SEQ ID NO: 28312 - protein, 227 aa, Artificial Sequence; identical to SEQ ID NO: 28309
  Synthetic

SEQ ID NO: 28313 - protein, 231 aa, Artificial Sequence
  Synthetic
SAEDLVRRVKDLVDKLEDKLRKVVRTNERLWEEIRKRLEELVRRNKELWDALVEKLKAGDKDKDELIEEAKSLEDESNALVEKLVRDIERVLAESNKLLDTLAKEIEEVLEEIVELVERGSGSDKEAREKLEDIKARLKEVLKKLREESKRIIDELRRLLEEYKRLVKEIRDRIEEVRKRNSEIRVLVELVRRHNKVLKELVEELEKLAMSCAQESEEVVRELVELLSRAV

SEQ ID NO: 28314 - protein, 232 aa, Artificial Sequence
  Synthetic
SAEDLVRRVKDLVDKLEDKLRKVVRTNERLWEEIRKRLEELVRRNKELWDALVEKLKAGDKDKDELIEEAKSLEDESNALVEKLVRDIERVLAESNKLLDTLAKEIEEVLEEIVELVERGSGSDKEAREKLEDIKARLKEVLKKLREESKRIIDELRRLLEEYKRLVKEIRDRIEEVRKRNSEIRVLVELVRRHNKVLKELVEELEKLLRMSCAQESEVVRELVELLSRAVE

SEQ ID NO: 28315 - protein, 235 aa, Artificial Sequence
  Synthetic
SAEDLVRRVKDLVDKLEDKLRKVVRTNERLWEEIRKRLEELVRRNKELWDALVEKLKAGDKDKDELIEEAKSLEDESNALVEKLVRDIERVLAESNKLLDTLAKEIEEVLEEIVELVERGSGSDKEAREKLEDIKARLKEVLKKLREESKRIIDELRRLLEEYKRLVKEIRDRIEEVRKRNSEIRVLVELVRRHNKVLKELVEELEKLVRDLAMSCAQESRELVELLSRAVEVIK

SEQ ID NO: 28316 - protein, 239 aa, Artificial Sequence
  Synthetic
SAEDLVRRVKDLVDKLEDKLRKVVRTNERLWEEIRKRLEELVRRNKELWDALVEKLKAGDKDKDELIEEAKSLEDESNALVEKLVRDIERVLAESNKLLDTLAKEIEEVLEEIVELVERGSGSDKEAREKLEDIKARLKEVLKKLREESKRIIDELRRLLEEYKRLVKEIRDRIEEVRKRNSEIRVLVELVRRHNKVLKELVEELEKLVRDHNRVLKMSCAQESELLSRAVEVIKEVVK

SEQ ID NO: 28317 - protein, 217 aa, Artificial Sequence
  Synthetic
SEKELVDDIRRILEEILRLLRSLLEEVIRLLEENEKLVRRHLKTVIDILRRVAKLLDENGIRTDEADRVLERLEKAHRELLEDYKRALEKIKETLERVLREAEEVVKKIDDALRKLGGSKEVLKRLLEELLRLVEKIAEEIKRLLSELVRVTEELVRTNKELLEEAVRVIRKEVGDDSLVREVEELIKRLEKHLDMSCAQESDLVKRVLDLVDEVVK

SEQ ID NO: 28318 - protein, 220 aa, Artificial Sequence
  Synthetic
SEKELVDDIRRILEEILRLLRSLLEEVIRLLEENEKLVRRHLKTVIDILRRVAKLLDENGIRTDEADRVLERLEKAHRELLEDYKRALEKIKETLERVLREAEEVVKKIDDALRKLGGSKEVLKRLLEELLRLVEKIAEEIKRLLSELVRVTEELVRTNKELLEEAVRVIRKEVGDDSLVREVEELIKRLEKHIDDLLMSCAQESKRVLDLVDEVVKRVE

SEQ ID NO: 28319 - protein, 224 aa, Artificial Sequence
  Synthetic
SEKELVDDIRRILEEILRLLRSLLEEVIRLLEENEKLVRRHLKTVIDILRRVAKLLDENGIRTDEADRVLERLEKAHRELLEDYKRALEKIKETLERVLREAEEVVKKIDDALRKLGGSKEVLKRLLEELLRLVEKIAEEIKRLLSELVRVTEELVRTNKELLEEAVRVIRKEVGDDSLVREVEELIKRLEKHIDDLLKTLRMSCAQESDLVDEVVKRVEDLVE

SEQ ID NO: 28320 - protein, 227 aa, Artificial Sequence
  Synthetic
SEKELVDDIRRILEEILRLLRSLLEEVIRLLEENEKLVRRHLKTVIDILRRVAKLLDENGIRTDEADRVLERLEKAHRELLEDYKRALEKIKETLERVLREAEEVVKKIDDALRKLGGSKEVLKRLLEELLRLVEKIAEEIKRLLSELVRVTEELVRTNKELLEEAVRVIRKEVGDDSLVREVEELIKRLEKHIDDLLKTSRDLVMSCAQESDEVVKRVEDLVERVK

SEQ ID NO: 28321 - protein, 228 aa, Artificial Sequence
  Synthetic
SEKELVDDIRRILEEILRLLRSLLEEVIRLLEENEKLVRRHLKTVIDILRRVAKLLDENGIRTDEADRVLERLEKAHRELLEDYKRALEKIKETLERVLREAEEVVKKIDDALRKLGGSKEVLKRLLEELLRLVEKIAEEIKRLLSELVRVTEELVRTNKELLEEAVRVIRKEVGDDSLVREVEELIKRLEKHIDDLLKTSRDLLKMSCAQESEVVKRVEDLVERVKE

SEQ ID NO: 28322 - protein, 231 aa, Artificial Sequence
  Synthetic
SEKELVDDIRRILEEILRLLRSLLEEVIRLLEENEKLVRRHLKTVIDILRRVAKLLDENGIRTDEADRVLERLEKAHRELLEDYKRALEKIKETLERVLREAEEVVKKIDDALRKLGGSKEVLKRLLEELLRLVEKIAEEIKRLLSELVRVTEELVRTNKELLEEAVRVIRKEVGDDSLVREVEELIKRLEKHIDDLLKTSRDLVKRLAMSCAQESKRVEDLVERVKEKID

SEQ ID NO: 28323 - protein, 217 aa, Artificial Sequence
  Synthetic
SEKELVDDIRRILEEILRLLRSLLEEVIRLLEENEKLVRRHLKTVIDILRRVAKLLDENGIRTDEADRVLERLEKAHRELLEDYKRALEKIKETLERVLREAEEVVKKIDDALRKLGGSKEVLKRLLEELLRLVEKIAEEIKRLLSELVRVTEELVRTNKELLEEAVRVIRKEVGDDSLVREVEELIKRLEKHLKMSCAQESDLVKRVLDLVDEVVK

SEQ ID NO: 28324 - protein, 219 aa, Artificial Sequence
  Synthetic
SEKELVDDIRRILEEILRLLRSLLEEVIRLLEENEKLVRRHLKTVIDILRRVAKLLDENGIRTDEADRVLERLEKAHRELLEDYKRALEKIKETLERVLREAEEVVKKIDDALRKLGGSKEVLKRLLEELLRLVEKIAEEIKRLLSELVRVTEELVRTNKELLEEAVRVIRKEVGDDSLVREVEELIKRLEKHIDLLMSCAQESVKRVLDLVDEVVKRV

SEQ ID NO: 28325 - protein, 220 aa, Artificial Sequence; identical to SEQ ID NO: 28318
  Synthetic

SEQ ID NO: 28326 - protein, 223 aa, Artificial Sequence
  Synthetic
SEKELVDDIRRILEEILRLLRSLLEEVIRLLEENEKLVRRHLKTVIDILRRVAKLLDENGIRTDEADRVLERLEKAHRELLEDYKRALEKIKETLERVLREAEEVVKKIDDALRKLGGSKEVLKRLLEELLRLVEKIAEEIKRLLSELVRVTEELVRTNKELLEEAVRVIRKEVGDDSLVREVEELIKRLEKHIDDLLKLAMSCAQESLDLVDEVVKRVEDLV

SEQ ID NO: 28327 - protein, 224 aa, Artificial Sequence
  Synthetic
SEKELVDDIRRILEEILRLLRSLLEEVIRLLEENEKLVRRHLKTVIDILRRVAKLLDENGIRTDEADRVLERLEKAHRELLEDYKRALEKIKETLERVLREAEEVVKKIDDALRKLGGSKEVLKRLLEELLRLVEKIAEEIKRLLSELVRVTEELVRTNKELLEEAVRVIRKEVGDDSLVREVEELIKRLEKHIDDLLKTLIMSCAQESDLVDEVVKRVEDLVE

SEQ ID NO: 28328 - protein, 227 aa, Artificial Sequence
  Synthetic
SEKELVDDIRRILEEILRLLRSLLEEVIRLLEENEKLVRRHLKTVIDILRRVAKLLDENGIRTDEADRVLERLEKAHRELLEDYKRALEKIKETLERVLREAEEVVKKIDDALRKLGGSKEVLKRLLEELLRLVEKIAEEIKRLLSELVRVTEELVRTNKELLEEAVRVIRKEVGDDSLVREVEELIKRLEKHIDDLLKTSRDLCMSCAQESDEVVKRVEDLVERVK

SEQ ID NO: 28329 - protein, 228 aa, Artificial Sequence; identical to SEQ ID NO: 28321
  Synthetic

SEQ ID NO: 28330 - protein, 231 aa, Artificial Sequence; identical to SEQ ID NO: 28322
  Synthetic

SEQ ID NO: 28331 - protein, 239 aa, Artificial Sequence
  Synthetic
DEERLAEELERVLDRNRKLLEEALRELRRVIEENRKSVKRLLDELKRVLDELLKVLRELSRGDSDEELRKVIEDLIRKLTKVLDKVRSLVEENIERLARVLEKLERLARENLEDLKKVLDDVDKKLKDRRLVERLAELVRELIEVNKEILEMLKEIVRELLEINRTLLERLKDLVATALEIIKLLARGDGTEEDVERAVKEIRDRLRKLLEDYERLVMSCAQESRRVRERYEAVLKRIK

SEQ ID NO: 28332 - protein, 243 aa, Artificial Sequence
  Synthetic
DEERLAEELERVLDRNRKLLEEALRELRRVIEENRKSVKRLLDELKRVLDELLKVLRELSRGDSDEELRKVIEDLIRKLTKVLDKVRSLVEENIERLARVLEKLERLARENLEDLKKVLDDVDKKLKDRRLVERLAELVRELIEVNKEILEMLKEIVRELLEINRTLLERLKDLVATALEIIKLLARGDGTEEDVERAVKEIRDRLRKLLEDYERAVRRLLMSCAQESERYEAVLKRIKDKLE

SEQ ID NO: 28333 - protein, 246 aa, Artificial Sequence
  Synthetic
DEERLAEELERVLDRNRKLLEEALRELRRVIEENRKSVKRLLDELKRVLDELLKVLRELSRGDSDEELRKVIEDLIRKLTKVLDKVRSLVEENIERLARVLEKLERLARENLEDLKKVLDDVDKKLKDRRLVERLAELVRELIEVNKEILEMLKEIVRELLEINRTLLERLKDLVATALEIIKLLARGDGTEEDVERAVKEIRDRLRKLLEDYERAVRRLEDLLMSCAQESEAVLKRIKDKLEETK

SEQ ID NO: 28334 - protein, 236 aa, Artificial Sequence
  Synthetic
DEERLAEELERVLDRNRKLLEEALRELRRVIEENRKSVKRLLDELKRVLDELLKVLRELSRGDSDEELRKVIEDLIRKLTKVLDKVRSLVEENIERLARVLEKLERLARENLEDLKKVLDDVDKKLKDRRLVERLAELVRELIEVNKEILEMLKEIVRELLEINRTLLERLKDLVATALEIIKLLARGDGTEEDVERAVKEIRDRLRKLLEDLEMSCAQESDKLRRVRERYEAVLK

SEQ ID NO: 28335 - protein, 239 aa, Artificial Sequence; identical to SEQ ID NO: 28331
  Synthetic

SEQ ID NO: 28336 - protein, 243 aa, Artificial Sequence; identical to SEQ ID NO: 28332
  Synthetic

SEQ ID NO: 28337 - protein, 246 aa, Artificial Sequence
  Synthetic
DEERLAEELERVLDRNRKLLEEALRELRRVIEENRKSVKRLLDELKRVLDELLKVLRELSRGDSDEELRKVIEDLIRKLTKVLDKVRSLVEENIERLARVLEKLERLARENLEDLKKVLDDVDKKLKDRRLVERLAELVRELIEVNKEILEMLKEIVRELLEINRTLLERLKDLVATALEIIKLLARGDGTEEDVERAVKEIRDRLRKLLEDYERAVRRLEDLAMSCAQESEAVLKRIKDKLEETK

SEQ ID NO: 28338 - protein, 228 aa, Artificial Sequence
  Synthetic
SRVEELKKLIEDILRISREVVERIARVAEDIHRINRRVLDDLRKLIEDILRTVEEILARKVSGTEAAEALRDTIRRVVDEIRKLLEEHEKRSAELLEEIRKLLEDILRRSERAVEEIRELLKKGVSTKDVLRIIEEILREHLELLERVVRRIEEILRELLKTIEEIVKRIKEILEELKEVLKRGSVGDDEVEREIRRVKEDLDRLLMSCAQESEEIKRKLEEILRRVE

SEQ ID NO: 28339 - protein, 232 aa, Artificial Sequence
  Synthetic
SRVEELKKLIEDILRISREVVERIARVAEDIHRINRRVLDDLRKLIEDILRTVEEILARKVSGTEAAEALRDTIRRVVDEIRKLLEEHEKRSAELLEEIRKLLEDILRRSERAVEEIRELLKKGVSTKDVLRIIEEILREHLELLERVVRRIEEILRELLKTIEEIVKRIKEILEELKEVLKRGSVGDDEVEREIRRVKEDLDRILEELRMSCAQESRKLEEILRRVEELHR

SEQ ID NO: 28340 - protein, 235 aa, Artificial Sequence
  Synthetic
SRVEELKKLIEDILRISREVVERIARVAEDIHRINRRVLDDLRKLIEDILRTVEEILARKVSGTEAAEALRDTIRRVVDEIRKLLEEHEKRSAELLEEIRKLLEDILRRSERAVEEIRELLKKGVSTKDVLRIIEEILREHLELLERVVRRIEEILRELLKTIEEIVKRIKEILEELKEVLKRGSVGDDEVEREIRRVKEDLDRILEEYRRLLMSCAQESEEILRRVEELHRRLR

SEQ ID NO: 28341 - protein, 239 aa, Artificial Sequence
  Synthetic
SRVEELKKLIEDILRISREVVERIARVAEDIHRINRRVLDDLRKLIEDILRTVEEILARKVSGTEAAEALRDTIRRVVDEIRKLLEEHEKRSAELLEEIRKLLEDILRRSERAVEEIRELLKKGVSTKDVLRIIEEILREHLELLERVVRRIEEILRELLKTIEEIVKRIKEILEELKEVLKRGSVGDDEVEREIRRVKEDLDRILEEYRRLLEELLMSCAQESRRVEELHRRLRRKLE

SEQ ID NO: 28342 - protein, 228 aa, Artificial Sequence; identical to SEQ ID NO: 28338
  Synthetic

SEQ ID NO: 28343 - protein, 232 aa, Artificial Sequence; identical to SEQ ID NO: 28339
  Synthetic

SEQ ID NO: 28344 - protein, 239 aa, Artificial Sequence
  Synthetic
SRVEELKKLIEDILRISREVVERIARVAEDIHRINRRVLDDLRKLIEDILRTVEEILARKVSGTEAAEALRDTIRRVVDEIRKLLEEHEKRSAELLEEIRKLLEDILRRSERAVEEIRELLKKGVSTKDVLRIIEEILREHLELLERVVRRIEEILRELLKTIEEIVKRIKEILEELKEVLKRGSVGDDEVEREIRRVKEDLDRILEEYRRLLEELYMSCAQESRRVEELHRRLRRKLE

SEQ ID NO: 28345 - protein, 236 aa, Artificial Sequence
  Synthetic
DEDRRLEDAVAKLRKEHADIMKKLDDIMRELDEDHARIKERLDRILEELKALLTRVLRETREDELLRKVLELLTRLLKLLADVLEENKRLLEDILRLLKELIETNLRLLEEILALLRKVARGPVSEEEAKRLVEEITRLLEASTEEARKLVETIKRLLEESLDKLRSLVEEIERRLRTVLEEIRRRGAPEEIERIIRRVIEVIREILDLVRKLNMSCAQESEEILEDLARVNKKAV

SEQ ID NO: 28346 - protein, 237 aa, Artificial Sequence
  Synthetic
DEDRRLEDAVAKLRKEHADIMKKLDDIMRELDEDHARIKERLDRILEELKALLTRVLRETREDELLRKVLELLTRLLKLLADVLEENKRLLEDILRLLKELIETNLRLLEEILALLRKVARGPVSEEEAKRLVEEITRLLEASTEEARKLVETIKRLLEESLDKLRSLVEEIERRLRTVLEEIRRRGAPEEIERIIRRVIEVIREILDLVRKVLKMSCAQESEILEDLARVNKKAVD

SEQ ID NO: 28347 - protein, 240 aa, Artificial Sequence
  Synthetic
DEDRRLEDAVAKLRKEHADIMKKLDDIMRELDEDHARIKERLDRILEELKALLTRVLRETREDELLRKVLELLTRLLKLLADVLEENKRLLEDILRLLKELIETNLRLLEEILALLRKVARGPVSEEEAKRLVEEITRLLEASTEEARKLVETIKRLLEESLDKLRSLVEEIERRLRTVLEEIRRRGAPEEIERIIRRVIEVIREILDLVRKVNKKLAMSCAQESEDLARVNKKAVDAID

SEQ ID NO: 28348 - protein, 243 aa, Artificial Sequence
  Synthetic
DEDRRLEDAVAKLRKEHADIMKKLDDIMRELDEDHARIKERLDRILEELKALLTRVLRETREDELLRKVLELLTRLLKLLADVLEENKRLLEDILRLLKELIETNLRLLEEILALLRKVARGPVSEEEAKRLVEEITRLLEASTEEARKLVETIKRLLEESLDKLRSLVEEIERRLRTVLEEIRRRGAPEEIERIIRRVIEVIREILDLVRKVNKKALRLCMSCAQESARVNKKAVDAIDELA

SEQ ID NO: 28349 - protein, 244 aa, Artificial Sequence
  Synthetic
DEDRRLEDAVAKLRKEHADIMKKLDDIMRELDEDHARIKERLDRILEELKALLTRVLRETREDELLRKVLELLTRLLKLLADVLEENKRLLEDILRLLKELIETNLRLLEEILALLRKVARGPVSEEEAKRLVEEITRLLEASTEEARKLVETIKRLLEESLDKLRSLVEEIERRLRTVLEEIRRRGAPEEIERIIRRVIEVIREILDLVRKVNKKALRVLEMSCAQESRVNKKAVDAIDELAK

SEQ ID NO: 28350 - protein, 237 aa, Artificial Sequence; identical to SEQ ID NO: 28346
  Synthetic

SEQ ID NO: 28351 - protein, 240 aa, Artificial Sequence; identical to SEQ ID NO: 28347
  Synthetic

SEQ ID NO: 28352 - protein, 243 aa, Artificial Sequence
  Synthetic
DEDRRLEDAVAKLRKEHADIMKKLDDIMRELDEDHARIKERLDRILEELKALLTRVLRETREDELLRKVLELLTRLLKLLADVLEENKRLLEDILRLLKELIETNLRLLEEILALLRKVARGPVSEEEAKRLVEEITRLLEASTEEARKLVETIKRLLEESLDKLRSLVEEIERRLRTVLEEIRRRGAPEEIERIIRRVIEVIREILDLVRKVNKKALRLIMSCAQESARVNKKAVDAIDELA

SEQ ID NO: 28353 - protein, 244 aa, Artificial Sequence; identical to SEQ ID NO: 28349
  Synthetic

SEQ ID NO: 28354 - protein, 225 aa, Artificial Sequence
  Synthetic
DEVEELLKRVRELLKASEELVRKILEDVKRLLERSIEEVEDLLRKVEELLKRLLDLVERGGSLDEILRELVRLLKEIVRKVLELNRKLVEDVIRIAKRLLELNAESVKEWDRILKLLRDGTGDKEELLKDAEEALEKYERAVREILKELEEIIKEYVRRVEELLKELKDAVDKAKDEVRKGSGDEDLIRDVDRVLKEIMDLLAMSCAQESELLEELLRLLEELVR

SEQ ID NO: 28355 - protein, 231 aa, Artificial Sequence
  Synthetic
DEVEELLKRVRELLKASEELVRKILEDVKRLLERSIEEVEDLLRKVEELLKRLLDLVERGGSLDEILRELVRLLKEIVRKVLELNRKLVEDVIRIAKRLLELNAESVKEWDRILKLLRDGTGDKEELLKDAEEALEKYERAVREILKELEEIIKEYVRRVEELLKELKDAVDKAKDEVRKGSGDEDLIRDVDRVLKEIMDLLRDLVRLTMSCAQESLRLLEELVRAHKELV

SEQ ID NO: 28356 - protein, 232 aa, Artificial Sequence
  Synthetic
DEVEELLKRVRELLKASEELVRKILEDVKRLLERSIEEVEDLLRKVEELLKRLLDLVERGGSLDEILRELVRLLKEIVRKVLELNRKLVEDVIRIAKRLLELNAESVKEWDRILKLLRDGTGDKEELLKDAEEALEKYERAVREILKELEEIIKEYVRRVEELLKELKDAVDKAKDEVRKGSGDEDLIRDVDRVLKEIMDLLRDLVRRLVMSCAQESRLLEELVRAHKELVR

SEQ ID NO: 28357 - protein, 236 aa, Artificial Sequence
  Synthetic
DEVEELLKRVRELLKASEELVRKILEDVKRLLERSIEEVEDLLRKVEELLKRLLDLVERGGSLDEILRELVRLLKEIVRKVLELNRKLVEDVIRIAKRLLELNAESVKEWDRILKLLRDGTGDKEELLKDAEEALEKYERAVREILKELEEIIKEYVRRVEELLKELKDAVDKAKDEVRKGSGDEDLIRDVDRVLKEIMDLLRDLVRRTKELLLMSCAQESELVRAHKELVRSILD

SEQ ID NO: 28358 - protein, 225 aa, Artificial Sequence; identical to SEQ ID NO: 28354
  Synthetic

SEQ ID NO: 28359 - protein, 236 aa, Artificial Sequence
  Synthetic
DEVEELLKRVRELLKASEELVRKILEDVKRLLERSIEEVEDLLRKVEELLKRLLDLVERGGSLDEILRELVRLLKEIVRKVLELNRKLVEDVIRIAKRLLELNAESVKEWDRILKLLRDGTGDKEELLKDAEEALEKYERAVREILKELEEIIKEYVRRVEELLKELKDAVDKAKDEVRKGSGDEDLIRDVDRVLKEIMDLLRDLVRRTKELLEMSCAQESELVRAHKELVRSILD

SEQ ID NO: 28360 - protein, 239 aa, Artificial Sequence
  Synthetic
DEVEELLKRVRELLKASEELVRKILEDVKRLLERSIEEVEDLLRKVEELLKRLLDLVERGGSLDEILRELVRLLKEIVRKVLELNRKLVEDVIRIAKRLLELNAESVKEWDRILKLLRDGTGDKEELLKDAEEALEKYERAVREILKELEEIIKEYVRRVEELLKELKDAVDKAKDEVRKGSGDEDLIRDVDRVLKEIMDLLRDLVRRTKELLEELLMSCAQESRAHKELVRSILDEIR

SEQ ID NO: 28361 - protein, 235 aa, Artificial Sequence
  Synthetic
SEAEELLRELEELLKKSEKVLEDLLRKNAELIKDSKARLDEVRRKVEKLAEEVEEVIRRGVSEEELIRVIKKVLDDLRSIIKELIEVSRKYLRTTLELVKELLDVSRDVLREVLRIIKALLDTGGKDGSEEKIKEIADVADEIRKLAEEDIRLIKKLLEESAKLVDEDVRKLEEIAKEITELVERLRRTGDKDAVRKLIEELKKLLEDLVELIMSCAQESHERLKALLDHHRELL

SEQ ID NO: 28362 - protein, 236 aa, Artificial Sequence
  Synthetic
SEAEELLRELEELLKKSEKVLEDLLRKNAELIKDSKARLDEVRRKVEKLAEEVEEVIRRGVSEEELIRVIKKVLDDLRSIIKELIEVSRKYLRTTLELVKELLDVSRDVLREVLRIIKALLDTGGKDGSEEKIKEIADVADEIRKLAEEDIRLIKKLLEESAKLVDEDVRKLEEIAKEITELVERLRRTGDKDAVRKLIEELKKLLEDLVEHLEMSCAQESERLKALLDHHRELLK

SEQ ID NO: 28363 - protein, 239 aa, Artificial Sequence
  Synthetic
SEAEELLRELEELLKKSEKVLEDLLRKNAELIKDSKARLDEVRRKVEKLAEEVEEVIRRGVSEEELIRVIKKVLDDLRSIIKELIEVSRKYLRTTLELVKELLDVSRDVLREVLRIIKALLDTGGKDGSEEKIKEIADVADEIRKLAEEDIRLIKKLLEESAKLVDEDVRKLEEIAKEITELVERLRRTGDKDAVRKLIEELKKLLEDLVEHHERLLMSCAQESKALLDHHRELLKTVL

SEQ ID NO: 28364 - protein, 235 aa, Artificial Sequence; identical to SEQ ID NO: 28361
  Synthetic

SEQ ID NO: 28365 - protein, 236 aa, Artificial Sequence; identical to SEQ ID NO: 28362
  Synthetic

SEQ ID NO: 28366 - protein, 239 aa, Artificial Sequence; identical to SEQ ID NO: 28363
  Synthetic

SEQ ID NO: 28367 - protein, 230 aa, Artificial Sequence
  Synthetic
DEEELLRRVTEELKRLLDEARKLHEDVKRELEKLLKENDDLLADVKRKLESLLEALKRGSGTADEVIERILRLVEELLKRHAETVERILKLVRDLLRLHEKLVKEILDLLTRLLELLERRGGSGNSEKVDALKKLAKSVVDEVERSLEELRRLVEEVIKRIRDSLRASARIVKEAVRELRELLRDGRDADKLLERIRALLETLLEVLLMSCAQESRILEELLRVAEENLR

SEQ ID NO: 28368 - protein, 236 aa, Artificial Sequence
  Synthetic
DEEELLRRVTEELKRLLDEARKLHEDVKRELEKLLKENDDLLADVKRKLESLLEALKRGSGTADEVIERILRLVEELLKRHAETVERILKLVRDLLRLHEKLVKEILDLLTRLLELLERRGGSGNSEKVDALKKLAKSVVDEVERSLEELRRLVEEVIKRIRDSLRASARIVKEAVRELRELLRDGRDADKLLERIRALLETLLEVLKRDNELIMSCAQESLRVAEENLRRIKEII

SEQ ID NO: 28369 - protein, 241 aa, Artificial Sequence
  Synthetic
DEEELLRRVTEELKRLLDEARKLHEDVKRELEKLLKENDDLLADVKRKLESLLEALKRGSGTADEVIERILRLVEELLKRHAETVERILKLVRDLLRLHEKLVKEILDLLTRLLELLERRGGSGNSEKVDALKKLAKSVVDEVERSLEELRRLVEEVIKRIRDSLRASARIVKEAVRELRELLRDGRDADKLLERIRALLETLLEVLKRDNEEIKRILEMSCAQESENLRRIKEIIDRLLD

SEQ ID NO: 28370 - protein, 244 aa, Artificial Sequence
  Synthetic
DEEELLRRVTEELKRLLDEARKLHEDVKRELEKLLKENDDLLADVKRKLESLLEALKRGSGTADEVIERILRLVEELLKRHAETVERILKLVRDLLRLHEKLVKEILDLLTRLLELLERRGGSGNSEKVDALKKLAKSVVDEVERSLEELRRLVEEVIKRIRDSLRASARIVKEAVRELRELLRDGRDADKLLERIRALLETLLEVLKRDNEEIKRILEELLMSCAQESRRIKEIIDRLLDATR

SEQ ID NO: 28371 - protein, 230 aa, Artificial Sequence
  Synthetic
DEEELLRRVTEELKRLLDEARKLHEDVKRELEKLLKENDDLLADVKRKLESLLEALKRGSGTADEVIERILRLVEELLKRHAETVERILKLVRDLLRLHEKLVKEILDLLTRLLELLERRGGSGNSEKVDALKKLAKSVVDEVERSLEELRRLVEEVIKRIRDSLRASARIVKEAVRELRELLRDGRDADKLLERIRALLETLLEVLKMSCAQESRILEELLRVAEENLR

SEQ ID NO: 28372 - protein, 236 aa, Artificial Sequence; identical to SEQ ID NO: 28368
  Synthetic

SEQ ID NO: 28373 - protein, 240 aa, Artificial Sequence
  Synthetic
DEEELLRRVTEELKRLLDEARKLHEDVKRELEKLLKENDDLLADVKRKLESLLEALKRGSGTADEVIERILRLVEELLKRHAETVERILKLVRDLLRLHEKLVKEILDLLTRLLELLERRGGSGNSEKVDALKKLAKSVVDEVERSLEELRRLVEEVIKRIRDSLRASARIVKEAVRELRELLRDGRDADKLLERIRALLETLLEVLKRDNEEIKRLIMSCAQESEENLRRIKEIIDRLL

SEQ ID NO: 28374 - protein, 241 aa, Artificial Sequence; identical to SEQ ID NO: 28369
  Synthetic

SEQ ID NO: 28375 - protein, 244 aa, Artificial Sequence; identical to SEQ ID NO: 28370
  Synthetic

SEQ ID NO: 28376 - protein, 234 aa, Artificial Sequence
  Synthetic
DAEEVVKRLADVLRENDETIRKVVEDLVRIAEENDRLWKKLVEDIAEILRRIVELLRRGGVPEELLDRLAKVVKSIVEKAEKILERLNRVSKAIAEKLKTIVDELNEVSKEIVKRAEDILRKGKDKETVLRALRTLVKEYADLSKEVLERVERIVREYVKLSDEVVKSLAEIVEELIRIIEDLLRKGNLDEDVKRALEELVSRLRKLLEDLAMSCAQESREVERIVRELAKRSD

SEQ ID NO: 28377 - protein, 237 aa, Artificial Sequence
  Synthetic
DAEEVVKRLADVLRENDETIRKVVEDLVRIAEENDRLWKKLVEDIAEILRRIVELLRRGGVPEELLDRLAKVVKSIVEKAEKILERLNRVSKAIAEKLKTIVDELNEVSKEIVKRAEDILRKGKDKETVLRALRTLVKEYADLSKEVLERVERIVREYVKLSDEVVKSLAEIVEELIRIIEDLLRKGNLDEDVKRALEELVSRLRKLLEDVKKLAMSCAQESERIVRELAKRSDEIL

SEQ ID NO: 28378 - protein, 241 aa, Artificial Sequence
  Synthetic
DAEEVVKRLADVLRENDETIRKVVEDLVRIAEENDRLWKKLVEDIAEILRRIVELLRRGGVPEELLDRLAKVVKSIVEKAEKILERLNRVSKAIAEKLKTIVDELNEVSKEIVKRAEDILRKGKDKETVLRALRTLVKEYADLSKEVLERVERIVREYVKLSDEVVKSLAEIVEELIRIIEDLLRKGNLDEDVKRALEELVSRLRKLLEDVKKASEDLVMSCAQESRELAKRSDEILKKLE

SEQ ID NO: 28379 - protein, 244 aa, Artificial Sequence
  Synthetic
DAEEVVKRLADVLRENDETIRKVVEDLVRIAEENDRLWKKLVEDIAEILRRIVELLRRGGVPEELLDRLAKVVKSIVEKAEKILERLNRVSKAIAEKLKTIVDELNEVSKEIVKRAEDILRKGKDKETVLRALRTLVKEYADLSKEVLERVERIVREYVKLSDEVVKSLAEIVEELIRIIEDLLRKGNLDEDVKRALEELVSRLRKLLEDVKKASEDIVRLQMSCAQESAKRSDEILKKLEDIV

SEQ ID NO: 28380 - protein, 245 aa, Artificial Sequence
  Synthetic
DAEEVVKRLADVLRENDETIRKVVEDLVRIAEENDRLWKKLVEDIAEILRRIVELLRRGGVPEELLDRLAKVVKSIVEKAEKILERLNRVSKAIAEKLKTIVDELNEVSKEIVKRAEDILRKGKDKETVLRALRTLVKEYADLSKEVLERVERIVREYVKLSDEVVKSLAEIVEELIRIIEDLLRKGNLDEDVKRALEELVSRLRKLLEDVKKASEDIVRELLMSCAQESKRSDEILKKLEDIVE

SEQ ID NO: 28381 - protein, 248 aa, Artificial Sequence
  Synthetic
DAEEVVKRLADVLRENDETIRKVVEDLVRIAEENDRLWKKLVEDIAEILRRIVELLRRGGVPEELLDRLAKVVKSIVEKAEKILERLNRVSKAIAEKLKTIVDELNEVSKEIVKRAEDILRKGKDKETVLRALRTLVKEYADLSKEVLERVERIVREYVKLSDEVVKSLAEIVEELIRIIEDLLRKGNLDEDVKRALEELVSRLRKLLEDVKKASEDIVREVERLVMSCAQESDEILKKLEDIVEKLR

SEQ ID NO: 28382 - protein, 234 aa, Artificial Sequence
  Synthetic
DAEEVVKRLADVLRENDETIRKVVEDLVRIAEENDRLWKKLVEDIAEILRRIVELLRRGGVPEELLDRLAKVVKSIVEKAEKILERLNRVSKAIAEKLKTIVDELNEVSKEIVKRAEDILRKGKDKETVLRALRTLVKEYADLSKEVLERVERIVREYVKLSDEVVKSLAEIVEELIRIIEDLLRKGNLDEDVKRALEELVSRLRKLLEDLRMSCAQESREVERIVRELAKRSD

SEQ ID NO: 28383 - protein, 237 aa, Artificial Sequence
  Synthetic
DAEEVVKRLADVLRENDETIRKVVEDLVRIAEENDRLWKKLVEDIAEILRRIVELLRRGGVPEELLDRLAKVVKSIVEKAEKILERLNRVSKAIAEKLKTIVDELNEVSKEIVKRAEDILRKGKDKETVLRALRTLVKEYADLSKEVLERVERIVREYVKLSDEVVKSLAEIVEELIRIIEDLLRKGNLDEDVKRALEELVSRLRKLLEDVKKLSMSCAQESERIVRELAKRSDEIL

SEQ ID NO: 28384 - protein, 238 aa, Artificial Sequence
  Synthetic
DAEEVVKRLADVLRENDETIRKVVEDLVRIAEENDRLWKKLVEDIAEILRRIVELLRRGGVPEELLDRLAKVVKSIVEKAEKILERLNRVSKAIAEKLKTIVDELNEVSKEIVKRAEDILRKGKDKETVLRALRTLVKEYADLSKEVLERVERIVREYVKLSDEVVKSLAEIVEELIRIIEDLLRKGNLDEDVKRALEELVSRLRKLLEDVKKALKMSCAQESRIVRELAKRSDEILK

SEQ ID NO: 28385 - protein, 241 aa, Artificial Sequence; identical to SEQ ID NO: 28378
  Synthetic

SEQ ID NO: 28386 - protein, 244 aa, Artificial Sequence
  Synthetic
DAEEVVKRLADVLRENDETIRKVVEDLVRIAEENDRLWKKLVEDIAEILRRIVELLRRGGVPEELLDRLAKVVKSIVEKAEKILERLNRVSKAIAEKLKTIVDELNEVSKEIVKRAEDILRKGKDKETVLRALRTLVKEYADLSKEVLERVERIVREYVKLSDEVVKSLAEIVEELIRIIEDLLRKGNLDEDVKRALEELVSRLRKLLEDVKKASEDIVRLVMSCAQESAKRSDEILKKLEDIV

SEQ ID NO: 28387 - protein, 245 aa, Artificial Sequence
  Synthetic
DAEEVVKRLADVLRENDETIRKVVEDLVRIAEENDRLWKKLVEDIAEILRRIVELLRRGGVPEELLDRLAKVVKSIVEKAEKILERLNRVSKAIAEKLKTIVDELNEVSKEIVKRAEDILRKGKDKETVLRALRTLVKEYADLSKEVLERVERIVREYVKLSDEVVKSLAEIVEELIRIIEDLLRKGNLDEDVKRALEELVSRLRKLLEDVKKASEDIVRELQMSCAQESKRSDEILKKLEDIVE

SEQ ID NO: 28388 - protein, 248 aa, Artificial Sequence; identical to SEQ ID NO: 28381
  Synthetic

SEQ ID NO: 28389 - protein, 232 aa, Artificial Sequence
  Synthetic
DKDKRLEELLKRLKELNDKTFEELERILEELKRANEASLREAERILEELRARIEGGNLDKRLAELLKKLLDDLKRLLEEYTRTNEELLKRLRELLERYRETNKKLLDLLRKLLDEARRTGTDEDLLRRLEDILRKYEDEVRRLLKELEDILREYEDTSRRLLEELERIAKEAAERVSRGSDKDVKDIIRTILEVARDLLRLLEEDSRTLAMSCAQESDLLREDSKANSEVVK

SEQ ID NO: 28390 - protein, 236 aa, Artificial Sequence
  Synthetic
DKDKRLEELLKRLKELNDKTFEELERILEELKRANEASLREAERILEELRARIEGGNLDKRLAELLKKLLDDLKRLLEEYTRTNEELLKRLRELLERYRETNKKLLDLLRKLLDEARRTGTDEDLLRRLEDILRKYEDEVRRLLKELEDILREYEDTSRRLLEELERIAKEAAERVSRGSDKDVKDIIRTILEVARDLLRLLEEDSRTNSEVLKMSCAQESEDSKANSEVVKRLLD

SEQ ID NO: 28391 - protein, 239 aa, Artificial Sequence
  Synthetic
DKDKRLEELLKRLKELNDKTFEELERILEELKRANEASLREAERILEELRARIEGGNLDKRLAELLKKLLDDLKRLLEEYTRTNEELLKRLRELLERYRETNKKLLDLLRKLLDEARRTGTDEDLLRRLEDILRKYEDEVRRLLKELEDILREYEDTSRRLLEELERIAKEAAERVSRGSDKDVKDIIRTILEVARDLLRLLEEDSRTNSEVVKRLKMSCAQESKANSEVVKRLLDVLR

SEQ ID NO: 28392 - protein, 232 aa, Artificial Sequence
  Synthetic
DKDKRLEELLKRLKELNDKTFEELERILEELKRANEASLREAERILEELRARIEGGNLDKRLAELLKKLLDDLKRLLEEYTRTNEELLKRLRELLERYRETNKKLLDLLRKLLDEARRTGTDEDLLRRLEDILRKYEDEVRRLLKELEDILREYEDTSRRLLEELERIAKEAAERVSRGSDKDVKDIIRTILEVARDLLRLLEEDSRTLSMSCAQESDLLREDSKANSEVVK

SEQ ID NO: 28393 - protein, 235 aa, Artificial Sequence
  Synthetic
DKDKRLEELLKRLKELNDKTFEELERILEELKRANEASLREAERILEELRARIEGGNLDKRLAELLKKLLDDLKRLLEEYTRTNEELLKRLRELLERYRETNKKLLDLLRKLLDEARRTGTDEDLLRRLEDILRKYEDEVRRLLKELEDILREYEDTSRRLLEELERIAKEAAERVSRGSDKDVKDIIRTILEVARDLLRLLEEDSRTNSELAMSCAQESREDSKANSEVVKRLL

SEQ ID NO: 28394 - protein, 232 aa, Artificial Sequence
  Synthetic
SKEETLKRLLDELEKRNRETVERLERLLKELEDRNRASLEELEAVLEELERKIEESGLSKELKDTLARILEELRKLLEEYFRKNEELLRLLRKLLDEYARTNEELLRLLEELLDTARRTGGDSELLKRLEDIAREYEKRVRRLLEKLKDILDKYRKTVEELVRKMEEILKEAKKTISRIGSEEVKDIVRAMEEVIRRLIEILRRDVELLAMSCAQESELLKEDSKLNLDVAR

SEQ ID NO: 28395 - protein, 236 aa, Artificial Sequence
  Synthetic
SKEETLKRLLDELEKRNRETVERLERLLKELEDRNRASLEELEAVLEELERKIEESGLSKELKDTLARILEELRKLLEEYFRKNEELLRLLRKLLDEYARTNEELLRLLEELLDTARRTGGDSELLKRLEDIAREYEKRVRRLLEKLKDILDKYRKTVEELVRKMEEILKEAKKTISRIGSEEVKDIVRAMEEVIRRLIEILRRDVELNLDVLRMSCAQESEDSKLNLDVARELLE

SEQ ID NO: 28396 - protein, 238 aa, Artificial Sequence
  Synthetic
SKEETLKRLLDELEKRNRETVERLERLLKELEDRNRASLEELEAVLEELERKIEESGLSKELKDTLARILEELRKLLEEYFRKNEELLRLLRKLLDEYARTNEELLRLLEELLDTARRTGGDSELLKRLEDIAREYEKRVRRLLEKLKDILDKYRKTVEELVRKMEEILKEAKKTISRIGSEEVKDIVRAMEEVIRRLIEILRRDVELNLDVAKLLMSCAQESSKLNLDVARELLELL

SEQ ID NO: 28397 - protein, 239 aa, Artificial Sequence
  Synthetic
SKEETLKRLLDELEKRNRETVERLERLLKELEDRNRASLEELEAVLEELERKIEESGLSKELKDTLARILEELRKLLEEYFRKNEELLRLLRKLLDEYARTNEELLRLLEELLDTARRTGGDSELLKRLEDIAREYEKRVRRLLEKLKDILDKYRKTVEELVRKMEEILKEAKKTISRIGSEEVKDIVRAMEEVIRRLIEILRRDVELNLDVAKKLAMSCAQESKLNLDVARELLELLD

SEQ ID NO: 28398 - protein, 225 aa, Artificial Sequence
  Synthetic
SKEETLKRLLDELEKRNRETVERLERLLKELEDRNRASLEELEAVLEELERKIEESGLSKELKDTLARILEELRKLLEEYFRKNEELLRLLRKLLDEYARTNEELLRLLEELLDTARRTGGDSELLKRLEDIAREYEKRVRRLLEKLKDILDKYRKTVEELVRKMEEILKEAKKTISRIGSEEVKDIVRAMEEVIRRLIEILRMSCAQESDVAKKLLELLKEDSK

SEQ ID NO: 28399 - protein, 232 aa, Artificial Sequence
  Synthetic
SKEETLKRLLDELEKRNRETVERLERLLKELEDRNRASLEELEAVLEELERKIEESGLSKELKDTLARILEELRKLLEEYFRKNEELLRLLRKLLDEYARTNEELLRLLEELLDTARRTGGDSELLKRLEDIAREYEKRVRRLLEKLKDILDKYRKTVEELVRKMEEILKEAKKTISRIGSEEVKDIVRAMEEVIRRLIEILRRDVELLLMSCAQESELLKEDSKLNLDVAR

SEQ ID NO: 28400 - protein, 235 aa, Artificial Sequence
  Synthetic
SKEETLKRLLDELEKRNRETVERLERLLKELEDRNRASLEELEAVLEELERKIEESGLSKELKDTLARILEELRKLLEEYFRKNEELLRLLRKLLDEYARTNEELLRLLEELLDTARRTGGDSELLKRLEDIAREYEKRVRRLLEKLKDILDKYRKTVEELVRKMEEILKEAKKTISRIGSEEVKDIVRAMEEVIRRLIEILRRDVELNLDLAMSCAQESKEDSKLNLDVARELL

SEQ ID NO: 28401 - protein, 236 aa, Artificial Sequence
  Synthetic
SKEETLKRLLDELEKRNRETVERLERLLKELEDRNRASLEELEAVLEELERKIEESGLSKELKDTLARILEELRKLLEEYFRKNEELLRLLRKLLDEYARTNEELLRLLEELLDTARRTGGDSELLKRLEDIAREYEKRVRRLLEKLKDILDKYRKTVEELVRKMEEILKEAKKTISRIGSEEVKDIVRAMEEVIRRLIEILRRDVELNLDVLYMSCAQESEDSKLNLDVARELLE

SEQ ID NO: 28402 - protein, 238 aa, Artificial Sequence
  Synthetic
SKEETLKRLLDELEKRNRETVERLERLLKELEDRNRASLEELEAVLEELERKIEESGLSKELKDTLARILEELRKLLEEYFRKNEELLRLLRKLLDEYARTNEELLRLLEELLDTARRTGGDSELLKRLEDIAREYEKRVRRLLEKLKDILDKYRKTVEELVRKMEEILKEAKKTISRIGSEEVKDIVRAMEEVIRRLIEILRRDVELNLDVAKLAMSCAQESSKLNLDVARELLELL

SEQ ID NO: 28403 - protein, 239 aa, Artificial Sequence
  Synthetic
SKEETLKRLLDELEKRNRETVERLERLLKELEDRNRASLEELEAVLEELERKIEESGLSKELKDTLARILEELRKLLEEYFRKNEELLRLLRKLLDEYARTNEELLRLLEELLDTARRTGGDSELLKRLEDIAREYEKRVRRLLEKLKDILDKYRKTVEELVRKMEEILKEAKKTISRIGSEEVKDIVRAMEEVIRRLIEILRRDVELNLDVAKKLKMSCAQESKLNLDVARELLELLD

SEQ ID NO: 28404 - protein, 228 aa, Artificial Sequence
  Synthetic
DEEETLRRLLERKVELAKEYLDVSKEVIDRTTKLLDEYLKTSKRIVDATVELLERGDLGPDELIKRLAEELERSLRELEEEIKRLKRELEESLKKLKEIIDRLAEEAEKLLAVLKRGEGSEEEALRALASLVRELIEVLRENDERLRDVLRRLIEALRKNNEILERVLRKLVRAAEERGRDESSREALEEARRRLEELLRELNELTMSCAQESEKLLRDLNELTKALE

SEQ ID NO: 28405 - protein, 235 aa, Artificial Sequence
  Synthetic
DEEETLRRLLERKVELAKEYLDVSKEVIDRTTKLLDEYLKTSKRIVDATVELLERGDLGPDELIKRLAEELERSLRELEEEIKRLKRELEESLKKLKEIIDRLAEEAEKLLAVLKRGEGSEEEALRALASLVRELIEVLRENDERLRDVLRRLIEALRKNNEILERVLRKLVRAAEERGRDESSREALEEARRRLEELLRELNEITKDLEALLMSCAQESNELTKALEEELKRLL

SEQ ID NO: 28406 - protein, 236 aa, Artificial Sequence
  Synthetic
DEEETLRRLLERKVELAKEYLDVSKEVIDRTTKLLDEYLKTSKRIVDATVELLERGDLGPDELIKRLAEELERSLRELEEEIKRLKRELEESLKKLKEIIDRLAEEAEKLLAVLKRGEGSEEEALRALASLVRELIEVLRENDERLRDVLRRLIEALRKNNEILERVLRKLVRAAEERGRDESSREALEEARRRLEELLRELNEITKDLEAKLKMSCAQESELTKALEEELKRLLD

SEQ ID NO: 28407 - protein, 239 aa, Artificial Sequence
  Synthetic
DEEETLRRLLERKVELAKEYLDVSKEVIDRTTKLLDEYLKTSKRIVDATVELLERGDLGPDELIKRLAEELERSLRELEEEIKRLKRELEESLKKLKEIIDRLAEEAEKLLAVLKRGEGSEEEALRALASLVRELIEVLRENDERLRDVLRRLIEALRKNNEILERVLRKLVRAAEERGRDESSREALEEARRRLEELLRELNEITKDLEAKLEKLLMSCAQESKALEEELKRLLDELK

SEQ ID NO: 28408 - protein, 242 aa, Artificial Sequence
  Synthetic
DEEETLRRLLERKVELAKEYLDVSKEVIDRTTKLLDEYLKTSKRIVDATVELLERGDLGPDELIKRLAEELERSLRELEEEIKRLKRELEESLKKLKEIIDRLAEEAEKLLAVLKRGEGSEEEALRALASLVRELIEVLRENDERLRDVLRRLIEALRKNNEILERVLRKLVRAAEERGRDESSREALEEARRRLEELLRELNEITKDLEAKLEKLLRLLMSCAQESEEELKRLLDELKKRT

SEQ ID NO: 28409 - protein, 243 aa, Artificial Sequence
  Synthetic
DEEETLRRLLERKVELAKEYLDVSKEVIDRTTKLLDEYLKTSKRIVDATVELLERGDLGPDELIKRLAEELERSLRELEEEIKRLKRELEESLKKLKEIIDRLAEEAEKLLAVLKRGEGSEEEALRALASLVRELIEVLRENDERLRDVLRRLIEALRKNNEILERVLRKLVRAAEERGRDESSREALEEARRRLEELLRELNEITKDLEAKLEKLLRDLAMSCAQESEELKRLLDELKKRTD

SEQ ID NO: 28410 - protein, 228 aa, Artificial Sequence
  Synthetic
DEEETLRRLLERKVELAKEYLDVSKEVIDRTTKLLDEYLKTSKRIVDATVELLERGDLGPDELIKRLAEELERSLRELEEEIKRLKRELEESLKKLKEIIDRLAEEAEKLLAVLKRGEGSEEEALRALASLVRELIEVLRENDERLRDVLRRLIEALRKNNEILERVLRKLVRAAEERGRDESSREALEEARRRLEELLRELNELAMSCAQESEKLLRDLNELTKALE

SEQ ID NO: 28411 - protein, 232 aa, Artificial Sequence
  Synthetic
DEEETLRRLLERKVELAKEYLDVSKEVIDRTTKLLDEYLKTSKRIVDATVELLERGDLGPDELIKRLAEELERSLRELEEEIKRLKRELEESLKKLKEIIDRLAEEAEKLLAVLKRGEGSEEEALRALASLVRELIEVLRENDERLRDVLRRLIEALRKNNEILERVLRKLVRAAEERGRDESSREALEEARRRLEELLRELNEITKDLEMSCAQESRDLNELTKALEEELK

SEQ ID NO: 28412 - protein, 235 aa, Artificial Sequence
  Synthetic
DEEETLRRLLERKVELAKEYLDVSKEVIDRTTKLLDEYLKTSKRIVDATVELLERGDLGPDELIKRLAEELERSLRELEEEIKRLKRELEESLKKLKEIIDRLAEEAEKLLAVLKRGEGSEEEALRALASLVRELIEVLRENDERLRDVLRRLIEALRKNNEILERVLRKLVRAAEERGRDESSREALEEARRRLEELLRELNEITKDLEALMMSCAQESNELTKALEEELKRLL

SEQ ID NO: 28413 - protein, 239 aa, Artificial Sequence; identical to SEQ ID NO: 28407
  Synthetic

SEQ ID NO: 28414 - protein, 242 aa, Artificial Sequence; identical to SEQ ID NO: 28408
  Synthetic

SEQ ID NO: 28415 - protein, 243 aa, Artificial Sequence; identical to SEQ ID NO: 28409
  Synthetic

SEQ ID NO: 28416 - protein, 235 aa, Artificial Sequence
  Synthetic
SEAERTKESLKKVLKALVDLNRELLRKLEENMRELTKLNEEVKRALKEVLDKVREGGIVDKDAEREAERLMRELDKSSEDTARETRKLIEESKKSTRRTEEEARKLTETLDRLAKGGLPREDLLRALVRLLEELARLIEEDVRRNAELVKRHIELVERDVAELLRLIKELVDLLADLAEKGSRTEEIRKIVEEILKEIKELADRYREEVRKLKMSCAQESEDYKRKVDELKERLR

SEQ ID NO: 28417 - protein, 239 aa, Artificial Sequence
  Synthetic
SEAERTKESLKKVLKALVDLNRELLRKLEENMRELTKLNEEVKRALKEVLDKVREGGIVDKDAEREAERLMRELDKSSEDTARETRKLIEESKKSTRRTEEEARKLTETLDRLAKGGLPREDLLRALVRLLEELARLIEEDVRRNAELVKRHIELVERDVAELLRLIKELVDLLADLAEKGSRTEEIRKIVEEILKEIKELADRYREEVRKSKDKLRMSCAQESRKVDELKERLRELIE

SEQ ID NO: 28418 - protein, 239 aa, Artificial Sequence; identical to SEQ ID NO: 28417
  Synthetic

SEQ ID NO: 28419 - protein, 224 aa, Artificial Sequence
  Synthetic
SEVEDILRRLAELNKRLIDKLRELIDRIARLNEELLRVVEDILSRLKRLADELIRVVRERGDIPEELLRKLEEELKKIVDELRRLVEEYEKALRDLIKELRKAVEEYRRTLAELVERLRRLEGPEELLKDLAEDVSRNIKAVEEVIRRFEKNVEDNIEVVRRLVDALEKLVRRLESVLRGKGSDEDLKRLLEKLKEDVERLLMSCAQESAESLKHLEDVIRELE

SEQ ID NO: 28420 - protein, 231 aa, Artificial Sequence
  Synthetic
SEVEDILRRLAELNKRLIDKLRELIDRIARLNEELLRVVEDILSRLKRLADELIRVVRERGDIPEELLRKLEEELKKIVDELRRLVEEYEKALRDLIKELRKAVEEYRRTLAELVERLRRLEGPEELLKDLAEDVSRNIKAVEEVIRRFEKNVEDNIEVVRRLVDALEKLVRRLESVLRGKGSDEDLKRLLEKLKEDVERVLKEVRDLTMSCAQESEDVIRELEKKTEDSL

SEQ ID NO: 28421 - protein, 235 aa, Artificial Sequence
  Synthetic
SEVEDILRRLAELNKRLIDKLRELIDRIARLNEELLRVVEDILSRLKRLADELIRVVRERGDIPEELLRKLEEELKKIVDELRRLVEEYEKALRDLIKELRKAVEEYRRTLAELVERLRRLEGPEELLKDLAEDVSRNIKAVEEVIRRFEKNVEDNIEVVRRLVDALEKLVRRLESVLRGKGSDEDLKRLLEKLKEDVERVLKEVRDRTAELLMSCAQESRELEKKTEDSLRHME

SEQ ID NO: 28422 - protein, 238 aa, Artificial Sequence
  Synthetic
SEVEDILRRLAELNKRLIDKLRELIDRIARLNEELLRVVEDILSRLKRLADELIRVVRERGDIPEELLRKLEEELKKIVDELRRLVEEYEKALRDLIKELRKAVEEYRRTLAELVERLRRLEGPEELLKDLAEDVSRNIKAVEEVIRRFEKNVEDNIEVVRRLVDALEKLVRRLESVLRGKGSDEDLKRLLEKLKEDVERVLKEVRDRTAESLKLAMSCAQESEKKTEDSLRHMEERR

SEQ ID NO: 28423 - protein, 224 aa, Artificial Sequence; identical to SEQ ID NO: 28419
  Synthetic

SEQ ID NO: 28424 - protein, 231 aa, Artificial Sequence; identical to SEQ ID NO: 28420
  Synthetic

SEQ ID NO: 28425 - protein, 235 aa, Artificial Sequence; identical to SEQ ID NO: 28421
  Synthetic

SEQ ID NO: 28426 - protein, 238 aa, Artificial Sequence
  Synthetic
SEVEDILRRLAELNKRLIDKLRELIDRIARLNEELLRVVEDILSRLKRLADELIRVVRERGDIPEELLRKLEEELKKIVDELRRLVEEYEKALRDLIKELRKAVEEYRRTLAELVERLRRLEGPEELLKDLAEDVSRNIKAVEEVIRRFEKNVEDNIEVVRRLVDALEKLVRRLESVLRGKGSDEDLKRLLEKLKEDVERVLKEVRDRTAESLKLLMSCAQESEKKTEDSLRHMEERR

SEQ ID NO: 28427 - protein, 228 aa, Artificial Sequence
  Synthetic
DEERIIKTLEDINAKLVEDIKRILDKVAELNERLADAIRKILEETKRILEATTRKVRKDGEISEELLRRLEEKLRKLLEDLERVLAEHEDESRRILEEVERLLKRHADASKELLDRARSVARGVKSDKELVDRLKKLIDDSLESVRELIERLKELLDRLVKSVEDLIRTIKELLDRLVEVLREGVSDKDTLRTVEKLVEDVKRRLDMSCAQESRLIEEVKKELDKLLK

SEQ ID NO: 28428 - protein, 231 aa, Artificial Sequence
  Synthetic
DEERIIKTLEDINAKLVEDIKRILDKVAELNERLADAIRKILEETKRILEATTRKVRKDGEISEELLRRLEEKLRKLLEDLERVLAEHEDESRRILEEVERLLKRHADASKELLDRARSVARGVKSDKELVDRLKKLIDDSLESVRELIERLKELLDRLVKSVEDLIRTIKELLDRLVEVLREGVSDKDTLRTVEKLVEDVKRRLDKLGMSCAQESEEVKKELDKLLKEYE

SEQ ID NO: 28429 - protein, 235 aa, Artificial Sequence
  Synthetic
DEERIIKTLEDINAKLVEDIKRILDKVAELNERLADAIRKILEETKRILEATTRKVRKDGEISEELLRRLEEKLRKLLEDLERVLAEHEDESRRILEEVERLLKRHADASKELLDRARSVARGVKSDKELVDRLKKLIDDSLESVRELIERLKELLDRLVKSVEDLIRTIKELLDRLVEVLREGVSDKDTLRTVEKLVEDVKRRLDKLLEDLKMSCAQESKELDKLLKEYEDALR

SEQ ID NO: 28430 - protein, 238 aa, Artificial Sequence
  Synthetic
DEERIIKTLEDINAKLVEDIKRILDKVAELNERLADAIRKILEETKRILEATTRKVRKDGEISEELLRRLEEKLRKLLEDLERVLAEHEDESRRILEEVERLLKRHADASKELLDRARSVARGVKSDKELVDRLKKLIDDSLESVRELIERLKELLDRLVKSVEDLIRTIKELLDRLVEVLREGVSDKDTLRTVEKLVEDVKRRLDKLLEDYKRLMMSCAQESDKLLKEYEDALREIK

SEQ ID NO: 28431 - protein, 242 aa, Artificial Sequence
  Synthetic
DEERIIKTLEDINAKLVEDIKRILDKVAELNERLADAIRKILEETKRILEATTRKVRKDGEISEELLRRLEEKLRKLLEDLERVLAEHEDESRRILEEVERLLKRHADASKELLDRARSVARGVKSDKELVDRLKKLIDDSLESVRELIERLKELLDRLVKSVEDLIRTIKELLDRLVEVLREGVSDKDTLRTVEKLVEDVKRRLDKLLEDYKRLIEELKMSCAQESKEYEDALREIKKRID

SEQ ID NO: 28432 - protein, 228 aa, Artificial Sequence; identical to SEQ ID NO: 28427
  Synthetic

SEQ ID NO: 28433 - protein, 231 aa, Artificial Sequence; identical to SEQ ID NO: 28428
  Synthetic

SEQ ID NO: 28434 - protein, 235 aa, Artificial Sequence; identical to SEQ ID NO: 28429
  Synthetic

SEQ ID NO: 28435 - protein, 239 aa, Artificial Sequence
  Synthetic
DEERIIKTLEDINAKLVEDIKRILDKVAELNERLADAIRKILEETKRILEATTRKVRKDGEISEELLRRLEEKLRKLLEDLERVLAEHEDESRRILEEVERLLKRHADASKELLDRARSVARGVKSDKELVDRLKKLIDDSLESVRELIERLKELLDRLVKSVEDLIRTIKELLDRLVEVLREGVSDKDTLRTVEKLVEDVKRRLDKLLEDYKRLLEMSCAQESKLLKEYEDALREIKK

SEQ ID NO: 28436 - protein, 242 aa, Artificial Sequence; identical to SEQ ID NO: 28431
  Synthetic

SEQ ID NO: 28437 - protein, 217 aa, Artificial Sequence
  Synthetic
TEEEVVEDVKRVLDESHDDLRRLIETLTRVLRESLKRIKEALEELERVLKKLLDLLEGGRDAREVLDEIRKVLERLREVIEELLRINKEVLRELERVIRELLKKNEDLARRVRSGVKSRLLEVLERLARESLELNRAILEELRKLVEKSLRAVEKILKRLEEIVRKLLKLVEDGGPREEVKRVLEEARDELRRLLMSCAQESEELERELERLLREHR

SEQ ID NO: 28438 - protein, 221 aa, Artificial Sequence
  Synthetic
TEEEVVEDVKRVLDESHDDLRRLIETLTRVLRESLKRIKEALEELERVLKKLLDLLEGGRDAREVLDEIRKVLERLREVIEELLRINKEVLRELERVIRELLKKNEDLARRVRSGVKSRLLEVLERLARESLELNRAILEELRKLVEKSLRAVEKILKRLEEIVRKLLKLVEDGGPREEVKRVLEEARDELRRLLEELKMSCAQESRELERLLREHREVIR

SEQ ID NO: 28439 - protein, 224 aa, Artificial Sequence
  Synthetic
TEEEVVEDVKRVLDESHDDLRRLIETLTRVLRESLKRIKEALEELERVLKKLLDLLEGGRDAREVLDEIRKVLERLREVIEELLRINKEVLRELERVIRELLKKNEDLARRVRSGVKSRLLEVLERLARESLELNRAILEELRKLVEKSLRAVEKILKRLEEIVRKLLKLVEDGGPREEVKRVLEEARDELRRLLEEYKALVMSCAQESERLLREHREVIRRIK

SEQ ID NO: 28440 - protein, 231 aa, Artificial Sequence
  Synthetic
TEEEVVEDVKRVLDESHDDLRRLIETLTRVLRESLKRIKEALEELERVLKKLLDLLEGGRDAREVLDEIRKVLERLREVIEELLRINKEVLRELERVIRELLKKNEDLARRVRSGVKSRLLEVLERLARESLELNRAILEELRKLVEKSLRAVEKILKRLEEIVRKLLKLVEDGGPREEVKRVLEEARDELRRLLEEYKAIIEELERLLMSCAQESREVIRRIKEEIDKSS

SEQ ID NO: 28441 - protein, 217 aa, Artificial Sequence; identical to SEQ ID NO: 28437
  Synthetic

SEQ ID NO: 28442 - protein, 221 aa, Artificial Sequence; identical to SEQ ID NO: 28438
  Synthetic

SEQ ID NO: 28443 - protein, 224 aa, Artificial Sequence; identical to SEQ ID NO: 28439
  Synthetic

SEQ ID NO: 28444 - protein, 228 aa, Artificial Sequence
  Synthetic
TEEEVVEDVKRVLDESHDDLRRLIETLTRVLRESLKRIKEALEELERVLKKLLDLLEGGRDAREVLDEIRKVLERLREVIEELLRINKEVLRELERVIRELLKKNEDLARRVRSGVKSRLLEVLERLARESLELNRAILEELRKLVEKSLRAVEKILKRLEEIVRKLLKLVEDGGPREEVKRVLEEARDELRRLLEEYKAIIEELEMSCAQESREHREVIRRIKEEID

SEQ ID NO: 28445 - protein, 231 aa, Artificial Sequence; identical to SEQ ID NO: 28440
  Synthetic

SEQ ID NO: 28446 - protein, 219 aa, Artificial Sequence
  Synthetic
SEVERAVEDVKRALEENVRLSKELVDRVTKMAEDNVKLTKDIVDKVRRILEELVEVIERGGSDDTRRELIDKARRLLRKLRDELKESLDDARRLLEDIKRLIEESVKRLRDLLEKIRREKSLPEDLLRLLREVLEELKKINDELLDAVRRVLENSARVLETLLKLIEDVLRELERVTDKDEVRKIVRELVEEAKKLAMSCAQESKRVVEELKRVVKRDA

SEQ ID NO: 28447 - protein, 222 aa, Artificial Sequence
  Synthetic
SEVERAVEDVKRALEENVRLSKELVDRVTKMAEDNVKLTKDIVDKVRRILEELVEVIERGGSDDTRRELIDKARRLLRKLRDELKESLDDARRLLEDIKRLIEESVKRLRDLLEKIRREKSLPEDLLRLLREVLEELKKINDELLDAVRRVLENSARVLETLLKLIEDVLRELERVTDKDEVRKIVRELVEEAKKVVELAMSCAQESVEELKRVVKRDADVV

SEQ ID NO: 28448 - protein, 223 aa, Artificial Sequence
  Synthetic
SEVERAVEDVKRALEENVRLSKELVDRVTKMAEDNVKLTKDIVDKVRRILEELVEVIERGGSDDTRRELIDKARRLLRKLRDELKESLDDARRLLEDIKRLIEESVKRLRDLLEKIRREKSLPEDLLRLLREVLEELKKINDELLDAVRRVLENSARVLETLLKLIEDVLRELERVTDKDEVRKIVRELVEEAKKVVEYLAMSCAQESEELKRVVKRDADVVR

SEQ ID NO: 28449 - protein, 226 aa, Artificial Sequence
  Synthetic
SEVERAVEDVKRALEENVRLSKELVDRVTKMAEDNVKLTKDIVDKVRRILEELVEVIERGGSDDTRRELIDKARRLLRKLRDELKESLDDARRLLEDIKRLIEESVKRLRDLLEKIRREKSLPEDLLRLLREVLEELKKINDELLDAVRRVLENSARVLETLLKLIEDVLRELERVTDKDEVRKIVRELVEEAKKVVEYDTELAMSCAQESKRVVKRDADVVRKLV

SEQ ID NO: 28450 - protein, 230 aa, Artificial Sequence
  Synthetic
SEVERAVEDVKRALEENVRLSKELVDRVTKMAEDNVKLTKDIVDKVRRILEELVEVIERGGSDDTRRELIDKARRLLRKLRDELKESLDDARRLLEDIKRLIEESVKRLRDLLEKIRREKSLPEDLLRLLREVLEELKKINDELLDAVRRVLENSARVLETLLKLIEDVLRELERVTDKDEVRKIVRELVEEAKKVVEYDTENAKRLHMSCAQESKRDADVVRKLVELLD

SEQ ID NO: 28451 - protein, 234 aa, Artificial Sequence
  Synthetic
SEVERAVEDVKRALEENVRLSKELVDRVTKMAEDNVKLTKDIVDKVRRILEELVEVIERGGSDDTRRELIDKARRLLRKLRDELKESLDDARRLLEDIKRLIEESVKRLRDLLEKIRREKSLPEDLLRLLREVLEELKKINDELLDAVRRVLENSARVLETLLKLIEDVLRELERVTDKDEVRKIVRELVEEAKKVVEYDTENAKRVVEELKMSCAQESDVVRKLVELLDRKAR

SEQ ID NO: 28452 - protein, 219 aa, Artificial Sequence
  Synthetic
SEVERAVEDVKRALEENVRLSKELVDRVTKMAEDNVKLTKDIVDKVRRILEELVEVIERGGSDDTRRELIDKARRLLRKLRDELKESLDDARRLLEDIKRLIEESVKRLRDLLEKIRREKSLPEDLLRLLREVLEELKKINDELLDAVRRVLENSARVLETLLKLIEDVLRELERVTDKDEVRKIVRELVEEAKKLVMSCAQESKRVVEELKRVVKRDA

SEQ ID NO: 28453 - protein, 222 aa, Artificial Sequence; identical to SEQ ID NO: 28447
  Synthetic

SEQ ID NO: 28454 - protein, 226 aa, Artificial Sequence; identical to SEQ ID NO: 28449
  Synthetic

SEQ ID NO: 28455 - protein, 234 aa, Artificial Sequence; identical to SEQ ID NO: 28451
  Synthetic

SEQ ID NO: 28456 - protein, 225 aa, Artificial Sequence
  Synthetic
SLEEIVKKLEDLNKKAVEILRRVLEEHEKLVEKVKKVLRDVLRLLEKVVREVIETLKKGDTDEKTREALKELEEVVRKIKEEVEKVLKRLEEVSKRLKDEVRRVLKESEDVAKKIRRDVRGVRSEDAAKRATDLLKETLTILEEAIRRIVKVIEDSLEILREAVEAIVRLLEELLSILARIGLDEEVLRKLKEIIKELKDRLIMSCAQESRIIDELRAELERVLR

SEQ ID NO: 28457 - protein, 232 aa, Artificial Sequence
  Synthetic
SLEEIVKKLEDLNKKAVEILRRVLEEHEKLVEKVKKVLRDVLRLLEKVVREVIETLKKGDTDEKTREALKELEEVVRKIKEEVEKVLKRLEEVSKRLKDEVRRVLKESEDVAKKIRRDVRGVRSEDAAKRATDLLKETLTILEEAIRRIVKVIEDSLEILREAVEAIVRLLEELLSILARIGLDEEVLRKLKEIIKELKDRLKKLLDDLAMSCAQESAELERVLREYEKILE

SEQ ID NO: 28458 - protein, 235 aa, Artificial Sequence
  Synthetic
SLEEIVKKLEDLNKKAVEILRRVLEEHEKLVEKVKKVLRDVLRLLEKVVREVIETLKKGDTDEKTREALKELEEVVRKIKEEVEKVLKRLEEVSKRLKDEVRRVLKESEDVAKKIRRDVRGVRSEDAAKRATDLLKETLTILEEAIRRIVKVIEDSLEILREAVEAIVRLLEELLSILARIGLDEEVLRKLKEIIKELKDRLKKLLDDYERLVMSCAQESERVLREYEKILEDLR

SEQ ID NO: 28459 - protein, 225 aa, Artificial Sequence; identical to SEQ ID NO: 28456
  Synthetic

SEQ ID NO: 28460 - protein, 232 aa, Artificial Sequence
  Synthetic
SLEEIVKKLEDLNKKAVEILRRVLEEHEKLVEKVKKVLRDVLRLLEKVVREVIETLKKGDTDEKTREALKELEEVVRKIKEEVEKVLKRLEEVSKRLKDEVRRVLKESEDVAKKIRRDVRGVRSEDAAKRATDLLKETLTILEEAIRRIVKVIEDSLEILREAVEAIVRLLEELLSILARIGLDEEVLRKLKEIIKELKDRLKKLLDDLKMSCAQESAELERVLREYEKILE

SEQ ID NO: 28461 - protein, 235 aa, Artificial Sequence; identical to SEQ ID NO: 28458
  Synthetic

SEQ ID NO: 28462 - protein, 238 aa, Artificial Sequence
  Synthetic
SLEEIVKKLEDLNKKAVEILRRVLEEHEKLVEKVKKVLRDVLRLLEKVVREVIETLKKGDTDEKTREALKELEEVVRKIKEEVEKVLKRLEEVSKRLKDEVRRVLKESEDVAKKIRRDVRGVRSEDAAKRATDLLKETLTILEEAIRRIVKVIEDSLEILREAVEAIVRLLEELLSILARIGLDEEVLRKLKEIIKELKDRLKKLLDDYERIIDLLMSCAQESLREYEKILEDLRKEL

SEQ ID NO: 28463 - protein, 226 aa, Artificial Sequence
  Synthetic
SADEALEELVRRLLEVLKTVLERTKELSRDDLRVVKEVLRIIEELVKRLLKVIRDGLDDADRVLEEVERVIREAKREVKRWEEVVRKVVEDSRRLIERVLAEVEEVIKEAKRLLDERKSGGSREVIEELLSLLREIVRHHKEVSDEHLKLSAELVKRILDVVEETLRLATEIVRRIKEGGNSEDVRRDIERLLEELKRRVERLLMSCAQESAELEKLNEDVLRENK

SEQ ID NO: 28464 - protein, 226 aa, Artificial Sequence; identical to SEQ ID NO: 28463
  Synthetic

SEQ ID NO: 28465 - protein, 240 aa, Artificial Sequence
  Synthetic
SADEALEELVRRLLEVLKTVLERTKELSRDDLRVVKEVLRIIEELVKRLLKVIRDGLDDADRVLEEVERVIREAKREVKRWEEVVRKVVEDSRRLIERVLAEVEEVIKEAKRLLDERKSGGSREVIEELLSLLREIVRHHKEVSDEHLKLSAELVKRILDVVEETLRLATEIVRRIKEGGNSEDVRRDIERLLEELKRRVERLLEDIERLLAELEKLIMSCAQESKALLEDLERRVRERK

SEQ ID NO: 28466 - protein, 9 aa, Artificial Sequence
  Synthetic peptide
LPMSCAQES

SEQ ID NO: 28467 - protein, 9 aa, Artificial Sequence
  Synthetic peptide
  MISC_FEATURE (2)..(2): Xaa is any amino acid except proline
LXMSCAQES

SEQ ID NO: 28468 - protein, 7 aa, Artificial Sequence
  Synthetic peptide
MSCAQES

SEQ ID NO: 28469 - protein, 24 aa, Artificial Sequence
  Synthetic peptide
  MISC_FEATURE (1)..(15): Optional residues
  MISC_FEATURE (20)..(24): Optional residues
  MISC_FEATURE (21)..(22): FAM moeity
KTRGVEEVAEGVVLLRRRGNKKKK

SEQ ID NO: 28470 - protein, 29 aa, Artificial Sequence
  Synthetic peptide
  MISC_FEATURE (1)..(9): Optional residues
  MISC_FEATURE (20)..(29): Optional residues
  MISC_FEATURE (26)..(27): FAM moeity
KPFLNGGPYHSREQSTDSGLGLGSYKKKK

SEQ ID NO: 28471 - protein, 27 aa, Artificial Sequence
  Synthetic peptide
  MISC_FEATURE (24)..(25): FAM moeity
ASADLDLEALAPYIPADDDFQLRKKKK

SEQ ID NO: 28472 - protein, 18 aa, Artificial Sequence
  Synthetic peptide
  MISC_FEATURE (1)..(2): PEG moiety
  MISC_FEATURE (1)..(5): Optional residues
  MISC_FEATURE (11)..(18): Optional residues
  MISC_FEATURE (15)..(16): FAM moeity
KKEEKDINNNVKKTKKKK

SEQ ID NO: 28473 - protein, 26 aa, Artificial Sequence
  Synthetic peptide
  MISC_FEATURE (23)..(24): FAM moeity
KAAEEEEVSLASTPTDVRDVDIKKKK

SEQ ID NO: 28474 - protein, 20 aa, Artificial Sequence
  Synthetic peptide
  MISC_FEATURE (1)..(9): Optional residues
  MISC_FEATURE (16)..(20): Optional residues
  MISC_FEATURE (17)..(18): FAM moeity
KKYSSQTSQDSGNYSNKKKK

SEQ ID NO: 28475 - protein, 26 aa, Artificial Sequence
  Synthetic peptide
  MISC_FEATURE (23)..(24): FAM moeity
KPLSSSVPSQKTYQGSYGFRLGKKKK

SEQ ID NO: 28476 - protein, 26 aa, Artificial Sequence
  Synthetic peptide
  MISC_FEATURE (1)..(9): Optional residues
  MISC_FEATURE (17)..(26): Optional residues
  MISC_FEATURE (23)..(24): FAM moeity
KAWQQQSYLDSGIHSGATTTAPKKKK

SEQ ID NO: 28477 - protein, 55 aa, Artificial Sequence
  Synthetic peptide
EARKAIARVKRESKRIVEDAERLIREAAAASEKISREAERLIREAAAASEKISRE

SEQ ID NO: 28478 - protein, 52 aa, Artificial Sequence
  Synthetic peptide
DEARKAIARVKRESKRIVEDAERLIREAAAASEKISREAERLIREAAAASEK

SEQ ID NO: 28479 - protein, 48 aa, Artificial Sequence
  Synthetic peptide
DEARKAIARVKRESKRIVEDAERLIREAAAASEKISREAERLIREAAK

SEQ ID NO: 28480 - protein, 44 aa, Artificial Sequence
  Synthetic peptide
DEARKAIARVKRESKRIVEDAERLIREAAAASEKISREAERLIR

SEQ ID NO: 28481 - protein, 41 aa, Artificial Sequence
  Synthetic peptide
DEARKAIARVKRESKRIVEDAERLIREAAAASEKISREAER

SEQ ID NO: 28482 - protein, 56 aa, Artificial Sequence
  Synthetic peptide
NKEEIEKLAKEAREKLKKAEKEHKEIHDKLRKKNKKAREDLKKKADELRETNKRVN

SEQ ID NO: 28483 - protein, 56 aa, Artificial Sequence
  Synthetic peptide
SSEKVRRELKESLKENHKQNQKLLKDHKRAQEKLNRELEELKKKHKKTLDDIRRES

SEQ ID NO: 28484 - protein, 56 aa, Artificial Sequence
  Synthetic peptide
DTVKRILEELRRRFEKLAKDLDDIARKLLEDHKKHNKELKDKQRKIKKEADDAARS

SEQ ID NO: 28485 - protein, 52 aa, Artificial Sequence
  Synthetic peptide
RILEELRRRFEKLAKDLDDIARKLLEDHKKHNKELKDKQRKIKKEADDAARS

SEQ ID NO: 28486 - protein, 49 aa, Artificial Sequence
  Synthetic peptide
EELRRRFEKLAKDLDDIARKLLEDHKKHNKELKDKQRKIKKEADDAARS

SEQ ID NO: 28487 - protein, 21 aa, Artificial Sequence
  Synthetic peptide
  MISC_FEATURE (1)..(1): Optional residue
  MISC_FEATURE (1)..(2): PEG moeity
  MISC_FEATURE (11)..(21): Optional residues
  MISC_FEATURE (18)..(19): FAM moeity
KDVQKADVSSTGQGIDSKKKK

SEQ ID NO: 28488 - protein, 24 aa, Artificial Sequence
  Synthetic peptide
  MISC_FEATURE (1)..(15): Optional residues
  MISC_FEATURE (20)..(24): Optional residues
KTRGVEEVAEGVVLLRRRGNKKKK

SEQ ID NO: 28489 - protein, 29 aa, Artificial Sequence
  Synthetic peptide
  MISC_FEATURE (1)..(9): Optional residues
  MISC_FEATURE (20)..(29): Optional residues
KPFLNGGPYHSREQSTDSGLGLGSYKKKK

SEQ ID NO: 28490 - protein, 27 aa, Artificial Sequence
  Synthetic peptide
ASADLDLEALAPYIPADDDFQLRKKKK

SEQ ID NO: 28491 - protein, 18 aa, Artificial Sequence
  Synthetic peptide
  MISC_FEATURE (1)..(5): Optional residues
  MISC_FEATURE (11)..(18): Optional residues
KKEEKDINNNVKKTKKKK

SEQ ID NO: 28492 - protein, 21 aa, Artificial Sequence
  Synthetic peptide
  MISC_FEATURE (1)..(1): Optional residue
  MISC_FEATURE (12)..(21): Optional residue
KDVQKADVSSTGQGIDSKKKK

SEQ ID NO: 28493 - protein, 26 aa, Artificial Sequence
  Synthetic peptide
KAAEEEEVSLASTPTDVRDVDIKKKK

SEQ ID NO: 28494 - protein, 20 aa, Artificial Sequence
  Synthetic peptide
  MISC_FEATURE (1)..(9): Optional residues
  MISC_FEATURE (16)..(20): Optional residues
KKYSSQTSQDSGNYSNKKKK

SEQ ID NO: 28495 - protein, 26 aa, Artificial Sequence
  Synthetic peptide
KPLSSSVPSQKTYQGSYGFRLGKKKK

SEQ ID NO: 28496 - protein, 26 aa, Artificial Sequence
  Synthetic peptide
  MISC_FEATURE (1)..(9): Optional residues
  MISC_FEATURE (17)..(26): Optional residues
KAWQQQSYLDSGIHSGATTTAPKKKK
